(19) United States
(12) Patent Application Publication
(10) Pub. No.: US 2004/0115630 A1
(43) Pub. Date: Jun. 17, 2004

(54) Method and nucleic acids for the analysis of astrocytomas

(76) Inventors: Alexander Olek, Berlin (DE); Christian Piepenbrock, Berlin (DE); Kurt Berlin, Stahnsdorf (DE)

Correspondence Address: DAVIDSON, DAVIDSON & KAPPEL, LLC, 485 SEVENTH AVENUE, 14TH FLOOR, NEW YORK, NY, 10018, US

(21) Appl. No.: 10/311,507

(22) PCT Filed: Jul. 2, 2001
(86) PCT No.: PCT/EP01/07538

(30) Foreign Application Priority Data
Jun. 30, 2000 (DE) 100 32 529.7
Sep. 1, 2000 (DE) 100 43 826.1

(51) Int. Cl. C12Q 1/68; C07H 21/04; C12P 19/34

(52) U.S. Cl. 435/6; 435/91.2; 536/24.3

(57) ABSTRACT

The present invention relates to chemically modified genomic sequences, to oligonucleotides and/or PNA-oligomers for detecting the cytosine methylation state of genomic DNA, as well as to a method for ascertaining genetic and/or epigenetic parameters of genes for use in the characterisation, classification, differentiation, grading, staging, treatment and/or diagnosis of astrocytomas, or the predisposition to astrocytomas.

### FIELD OF THE INVENTION

[0001] The levels of observation that have been studied by the methodological developments of recent years in molecular biology, are the genes themselves, the translation of these genes into RNA, and the resulting proteins. The question of which gene is switched on at which point in the course of the development of an individual, and how the activation and inhibition of specific genes in specific cells and tissues are controlled is correlatable to the degree and character of the methylation of the genes or of the genome. In this respect, pathogenic conditions may manifest themselves in a changed methylation pattern of individual genes or of the genome.

[0002] The present invention relates to nucleic acids, oligonucleotides, PNA-oligomers, and to a method for the characterisation, classification, differentiation, grading, staging, treatment and/or diagnosis of astrocytomas, or the predisposition to astrocytomas, by analysis of the genetic and/or epigenetic parameters of genomic DNA and, in particular, with the cytosine methylation status thereof.

### PRIOR ART

[0003] It is projected that 17,200 adults will develop brain tumors within the United States in 2001. Of the various classes of tumors, gliomas are the most common, of which astrocytomas are one of the most common. These may be graded according to the WHO classification into four categories, pilocytic astrocytomas, low-grade nonpilocytic astrocytomas, anaplastic gliomas, and glioblastomas multiforme. Pilocytic astrocytomas (WHO Grade I) are the most benign, and are usually found in childhood cases. They occasionally form cysts, or are enclosed within cysts, and are slow growing and generally noninvasive. Treatment in the first instance is by surgery, which in some cases may be followed by radiation therapy. The effectiveness of chemotherapy and other forms of treatment are currently being evaluated.

[0004] Grade II astrocytomas include fibrillary, gemistocytic and protoplasmic astrocytomas. As opposed to Grade I tumors they are infiltrative. Treatment, is ideally by complete surgical removal, where possible. In some cases surgery may be supplemented by radiation therapy.

[0005] A basic property of astrocytic gliomas is an ability to undergo anaplastic change. This is related to the development of serial genetic defects, accounting for the orderly progression of features of malignancy, i.e. hypercellularity, anaplasia. It is important to make the distinction between between Grade I pilocytic astrocytomas and diffusely infiltrating Grade II tumors because, it is only the latter group that has a propensity to developing into the malignant Grade III (e.g. anaplastic astrocytoma) and ultimately Grade IV (e.g. glioblastome multiforme) tumors.

[0006] Unlike breast and most other forms of cancer, there are no established guidlines for astrocytoma staging. Diagnosis is most often by scan imaging methods (e.g. MRI, CT) which may be followed by biopsy for histological and cytological analysis. The distinction between Grade I and Grade II astrocytomas may not always be clear using such methods.

[0007] Diagnosis by such methodologies does not utilise the molecular basis of the progression to malignancy. Furthermore, molecular markers offer the advantage that even samples of very small sizes and samples whose tissue architecture has not been maintained can be analyzed quite efficiently. Within the last decade numerous genes have been shown to be differentially expressed between benign and malignant tumors. However, no single marker has been shown to be sufficient for the distinction between the two tumors. High-dimensional mRNA based approaches have recently been shown to be able to provide a better means to distinguish between different tumor types and benign and malignant lesions. Application as a routine diagnostic tool in a clinical environment is however impeded by the extreme instability of mRNA, the rapidly occuring expression changes following certain triggers (e.g. sample collection), and, most importantly, the large amount of mRNA needed for analysis (Lipshutz, R. J. et al., Nature Genetics 21:20-24, 1999; Bowtell, D. D. L. Nature genetics suppl. 21:25-32, 1999), which often cannot be obtained from a routine biopsy.

[0008] Aberrant DNA methylation within CpG islands is common in human malignancies leading to abrogation or overexpression of a broad spectrum of genes (Jones, P. A. Cancer Res 65:2463-2467, 1996). Abnormal methylation has also been shown to occur in CpG rich regulatory elements in intronic and coding parts of genes for certain tumours (Chan, M. F., et al., Curr Top Microbiol Immunol 249:75-86,2000). Highly characteristic DNA methylation patterns could also be shown for breast cancer cell lines (Huang, T. H. -M., et al., Hum Mol Genet 8:459-470, 1999).

[0009] Abnormal methylation of genes has been linked to the incidence of gliomas (e.g. Epigenetic silencing of PEG3 gene expression in human glioma cell lines. Maegawa et. al. Mol Carcinog. 2001 May; 31(1):1-9. ). It has also been shown that methylation pattern analysis can be correlated with the development of low grade astrocytomas (Aberrant methylation of genes in low-grade astrocytomas. Costello J F, Plass C, Cavenee W K. Brain Tumor Pathol. 2000;17(2):49-56). However, the techniques used in such studies (restriction landmark genomic scanning, imprinting analysis) are: limited to research, they are unsuitable for use in a clinical or diagnostic setting, and do not provide the basis for the development of a medium or high throughput method for the analysis of gliomas.

[0010] 5-methylcytosine is the most frequent covalent base modification in the DNA of eukaryotic cells. It plays a role, for example, in the regulation of the transcription, in genetic imprinting, and in tumorigenesis. Therefore, the identification of 5-methylcytosine as a component of genetic information is of considerable interest. However, 5-methylcytosine positions cannot be identified by sequencing since 5-methylcytosine has the same base pairing behavior as cytosine. Moreover, the epigenetic information carried by 5-methylcytosine is completely lost during PCR amplification.

[0011] A relatively new and currently the most frequently used method for analyzing DNA for 5-methylcytosine is based upon the specific reaction of bisulfite with cytosine which, upon subsequent alkaline hydrolysis, is converted to uracil which corresponds to thymidine in its base pairing behavior. However, 5-methylcytosine remains unmodified under these conditions. Consequently, the original DNA is converted in such a manner that methylcytosine, which originally could not be distinguished from cytosine by its hybridization behavior, can now be detected as the only remaining cytosine using “normal” molecular biological techniques, for example, by amplification and hybridization or sequencing. All of these techniques are based on base pairing which can now be fully exploited. In terms of sensitivity, the prior art is defined by a method which encloses the DNA to be analyzed in an agarose matrix, thus preventing the diffusion and renaturation of the DNA (bisulfite only reacts with single-stranded DNA), and which replaces all precipitation and purification steps with fast dialysis (Olek A, Oswald J, Walter J. A modified and improved method for bisulphite based cytosine methylation analysis. Nucleic Acids Res. 1996 Dec. 15;24(24):5064-6). Using this method, it is possible to analyze individual cells, which illustrates the potential of the method. However, currently only individual regions of a length of up to approximately 3000 base pairs are analyzed, a global analysis of cells for thousands of possible methylation events is not possible. However, this method cannot reliably analyze very small fragments from small sample quantities either. These are lost through the matrix in spite of the diffusion protection.

[0012] An overview of the further known methods of detecting 5-methylcytosine may be gathered from the following review article: Rein, T., DePamphilis, M. L., Zorbas, H., Nucleic Acids Res. 1998, 26, 2255.

[0013] To date, barring few exceptions (e.g., Zeschnigk M, Lich C, Buiting K, Doerfler W, Horsthemke B. A single-tube PCR test for the diagnosis of Angelman and Prader-Willi syndrome based on allelic methylation differences at the SNRPN locus. Eur J Hum Genet. 1997 Mar-Apr;5(2):94-8) the bisulfite technique is only used in research. Always, however, short, specific fragments of a known gene are amplified subsequent to a bisulfite treatment and either completely sequenced (Olek A, Walter J. The pre-implantation ontogeny of the H19 methylation imprint. Nat Genet. 1997 Nov;17(3):275-6) or individual cytosine positions are detected by a primer extension reaction (Gonzalgo M L, Jones P A. Rapid quantitation of methylation differences at specific sites using methylation-sensitive single nucleotide primer extension (Ms-SNuPE). Nucleic Acids Res. 1997 Jun. 15;25(12):2529-31, WO 95/00669) or by enzymatic digestion (Xiong Z, Laird P W. COBRA: a sensitive and quantitative DNA methylation assay. Nucleic Acids Res. 1997 Jun. 15;25(12):2532-4). In addition, detection by hybridization has also been described (Olek et al., WO 99/28498).

[0014] Further publications dealing with the use of the bisulfite technique for methylation detection in individual genes are: Grigg G, Clark S. Sequencing 5-methylcytosine residues in genomic DNA. Bioessays. 1994 Jun; 16(6):431-6, 431; Zeschnigk M, Schmitz B, Dittrich B, Buiting K, Horsthemke B, Doerfler W. Imprinted segments in the human genome: different DNA methylation patterns in the Prader-Willi/Angelman syndrome region as determined by the genomic sequencing method. Hum Mol Genet. 1997 Mar;6(3):387-95; Feil R, Charlton J, Bird A P, Walter J, Reik W. Methylation analysis on individual chromosomes: improved protocol for bisulphite genomic sequencing. Nucleic Acids Res. 1994 Feb. 25;22(4):695-6; Martin V, Ribieras S, Song-Wang X, Rio M C, Dante P Genomic sequencing indicates a correlation between DNA hypomethylation in the 5′ region of the pS2 gene and its expression in human breast cancer cell lines. Gene. 1995 May 19;157(1-2):2614; WO 97/46705, WO 95/15373 and WO 97/45560.

[0015] An overview of the Prior Art in oligomer array manufacturing can be gathered from a special edition of Nature Genetics (Nature Genetics Supplement, Volume 21, January 1999), published in January 1999, and from the literature cited therein.

[0016] Fluorescently labeled probes are often used for the scanning of immobilized DNA arrays. The simple attachment of Cy3 and Cy5 dyes to the 5′-OH of the specific probe are particularly suitable for fluorescence labels. The detection of the fluorescence of the hybridized probes may be carried out, for example via a confocal microscope. Cy3 and Cy5 dyes, besides many others, are commercially available.

[0017] Matrix Assisted Laser Desorption Ionization Mass Spectrometry (MALDI-TOF) is a very efficient development for the analysis of biomolecules (Karas M, Hillenkamp F. Laser desorption ionization of proteins with molecular masses exceeding 10,000 daltons. Anal Chem. 1988 Oct. 15;60(20):2299-301). An analyte is embedded in a light-absorbing matrix. The matrix is evaporated by a short laser pulse thus transporting the analyte molecule into the vapor phase in an unfragmented manner. The analyte is ionized by collisions with matrix molecules. An applied voltage accelerates the ions into a field-free flight tube. Due to their different masses, the ions are accelerated at different rates. Smaller ions reach the detector sooner than bigger ones.

[0018] MALDI-TOF spectrometry is excellently suited to the analysis of peptides and proteins. The analysis of nucleic acids is somewhat more difficult (Gut I G, Beck S. DNA and Matrix Assisted Laser Desorption Ionization Mass Spectrometry. Current Innovations and Future Trends. 1995, 1; 147-57). The sensitivity to nucleic acids is approximately 100 times worse than to peptides and decreases disproportionally with increasing fragment size. For nucleic acids having a multiply negatively charged backbone, the ionization process via the matrix is considerably less efficient. In MALDI-TOF spectrometry, the selection of the matrix plays an eminently important role. For the desorption of peptides, several very efficient matrixes have been found which produce a very fine crystallization. There are now several responsive matrixes for DNA, however, the difference in sensitivity has not been reduced. The difference in sensitivity can be reduced by chemically modifying the DNA in such a manner that it becomes more similar to a peptide. Phosphorothioate nucleic acids in which the usual phosphates of the backbone are substituted with thiophosphates can be converted into a charge-neutral DNA using simple alkylation chemistry (Gut I G, Beck S. A procedure for selective DNA alkylation and detection by mass spectrometry. Nucleic Acids Res. 1995 Apr. 25;23(8):1367-73). The coupling of a charge tag to this modified DNA results in an increase in sensitivity to the same level as that found for peptides. A further advantage of charge tagging is the increased stability of the analysis against impurities which make the detection of unmodified substrates considerably more difficult.

[0019] Genomic DNA is obtained from DNA of cell, tissue or other test samples using standard methods. This standard methodology is found in references such as Fritsch and Maniatis eds., Molecular Cloning: A Laboratory Manual, 1989.

### DESCRIPTION

[0020] The disclosed invention provides a method and nucleic acids for the staging of astrocytomas. It discloses a means of distinguishing between healthy tissue, pilocytic astrocytoma (Grade I) and Grade II astrocytoma cells. This provides a means for the improved staging and grading of brain tumors, at a molecular level, as opposed to currently used methods of a relatively subjective nature such as histological analysis and scan imaging. This is of particular importance due to the different prognosis and treatment of Grade I and II astrocytoma patients. The disclosed invention provides the means for the development of a standardised method of astrocytoma staging, which currently does not exist. Furthermore, the disclosed invention presents improvements over the state of the art in that current methods of histological and cytological analysis require that the biopsy contain a sufficient amount of tissue. The method according to the present invention can be used for classification of minute samples.

[0021] The invention provides the chemically modified genomic DNA, as well as oligonucleotides and/or PNA-oligomers for detecting cytosine methylations, as well as a method which is particularly suitable for the characterisation, classification, differentiation, grading, staging, treatment and/or diagnosis of astrocytomas. The present invention is based on the discovery that genetic and epigenetic parameters and, in particular, the cytosine methylation patterns of genomic DNA are particularly suitable for characterisation, classification, differentiation, grading, staging, treatment and/or diagnosis of astrocytomas.

[0022] This objective is achieved according to the present invention using a nucleic acid containing a sequence of at least 18 bases in length of the chemically pretreated genomic DNA according to one of Seq. ID No.1 through Seq. ID No.120.

[0023] The chemically modified nucleic acid could heretofore not be connected with the ascertainment of disease relevant genetic and epigenetic parameters.

[0024] The object of the present invention is further achieved by an oligonucleotide or oligomer for the analysis of chemically pretreated DNA, for detecting the genomic cytosine methylation state, said oligonucleotide containing at least one base sequence having a length of at least 13 nucleotides which hybridizes to a chemically pretreated genomic DNA according to Seq. ID No.1 through Seq. ID No.120. The oligomer probes according to the present invention constitute important and effective tools which, for the first time, make it possible to ascertain specific genetic and epigenetic parameters of brain tumors, in particular, for use in characterisation, classification, differentiation, grading, staging, treatment and/or diagnosis of astrocytomas. The base sequence of the oligomers preferably contains at least one CpG dinucleotide. The probes may also exist in the form of a PNA (peptide nucleic acid) which has particularly preferred pairing properties. Particularly preferred are oligonucleotides according to the present invention in which the cytosine of the CpG dinucleotide is the 5^{th}-9^{th} nucleotide from the 5′-end of the 13-mer; in the case of PNA-oligomers, it is preferred for the cytosine of the CpG dinucleotide to be the 4^{th}-6^{th} nucleotide from the 5′-end of the 9-mer.

[0025] The oligomers according to the present invention are normally used in so called “sets” which contain at least one oligomer for each of the CpG dinucleotides of the sequences of Seq. ID No.1 through Seq. ID No.120. Preferred is a set which contains at least one oligomer for each of the CpG dinucleotides from one of Seq. ID No.1 through Seq. ID No.120.

[0026] Moreover, the present invention makes available a set of at least two oligonucleotides which can be used as so-called “primer oligonucleotides” for amplifying DNA sequences of one of Seq. ID No.1 through Seq. ID No.120 , or segments thereof

[0027] In the case of the sets of oligonucleotides according to the present invention, it is preferred that at least one oligonucleotide is bound to a solid phase. It is further preferred that all the oligonucleotides of one set are bound to a solid phase.

[0028] The present invention moreover relates to a set of at least 10 n (oligonucleotides and/or PNA-oligomers) used for detecting the cytosine methylation state in chemically pretreated genomic DNA (Seq. ID No.1 through Seq. ID No.120). These probes enable characterisation, classification, differentiation, grading, staging and/or diagnosis of genetic and epigenetic parameters of brain tumors, more specifically astrocytomas. Furthermore, the probes enable the diagnosis of predisposition to astrocytomas. The set of oligomers may also be used for detecting single nucleotide polymorphisms (SNPs) in chemically pretreated genomic DNA according to one of Seq. ID No.1 through Seq. ID No.120.

[0029] According to the present invention, it is preferred that an arrangement of different oligonucleotides and/or PNA-oligomers (a so-called “array”) made available by the present invention is present in a manner that it is likewise bound to a solid phase. This array of different oligonucleotide- and/or PNA-oligomer sequences can be characterized in that it is arranged on the solid phase in the form of a rectangular or hexagonal lattice. The solid phase surface is preferably composed of silicon, glass, polystyrene, aluminum, steel, iron, copper, nickel, silver, or gold. However, nitrocellulose as well as plastics such as nylon which can exist in the form of pellets or also as resin matrices are possible as well.

[0030] Therefore, a further subject matter of the present invention is a method for manufacturing an array fixed to a carrier material for the grading, staging, treatment and/or diagnosis of astrocytomas, in which method at least one oligomer according to the present invention is coupled to a solid phase. Methods for manufacturing such arrays are known, for example, from U.S. Pat. No. 5,744,305 by means of solid-phase chemistry and photolabile protecting groups.

[0031] A further subject matter of the present invention relates to a DNA chip for the characterisation, classification, differentiation, grading, staging, treatment and/or diagnosis of astrocytomas. Furthermore the DNA chip enables the diagnosis of predisposition to astrocytomas. The DNA chip contains at least one nucleic acid according to the present invention. DNA chips are known, for example, for U.S. Pat. No. 5,837,832.

[0032] Moreover, a subject matter of the present invention is a kit which may be composed, for example, of a bisulfite-containing reagent, a set of primer oligonucleotides containing at least two oligonucleotides whose sequences in each case correspond or are complementary to a 18 base long segment of the base sequences specified in the appendix (Seq. ID No.1 through Seq. ID No.120), oligonucleotides and/or PNA-oligomers as well as instructions for carrying out and evaluating the described method. However, a kit along the lines of the present invention can also contain only part of the aforementioned components.

[0033] The present invention also makes available a method for ascertaining genetic and/or epigenetic parameters of genomic DNA. The method is for use in the grading, staging, treatment and/or diagnosis of astrocytomas, in particular for the differentiation of Grade I and Grade II tumors. The method enables the analysis of cytosine methylations and single nucleotide polymorphisms, including the following steps:

[0034] In the first step of the method the genomic DNA sample must be isolated from tissue or cellular sources. Such sources may include cell lines, histological slides, body fluids, for example cerebrospinal fluid or lymphatic fluid, or tissue embedded in paraffin; for example, brain, central nervous system or lymphatic tissue. Extraction may be by means that are standard to one skilled in the art, these include the use of detergent lysates, sonification and vortexing with glass beads. Once the nucleic acids have been extracted the genomic double stranded DNA is used in the analysis.

[0035] In a preferred embodiment the DNA may be cleaved prior to the chemical treatment, this may be any means standard in the state of the art, in particular with restriction endonucleases.

[0036] In the second step of the method, the genomic DNA sample is chemically treated in such a manner that cytosine bases which are unmethylated at the 5′-position are converted to uracil, thymine, or another base which is dissimilar to cytosine in terms of hybridization behavior. This will be understood as ‘chemical pretreatment’ hereinafter.

[0037] The above described treatment of genomic DNA is preferably carried out with bisulfite (sulfite, disulfite) and subsequent alkaline hydrolysis which results in a conversion of non-methylated cytosine nucleobases to uracil or to another base which is dissimilar to cytosine in terms of base pairing behavior.

[0038] Fragments of the chemically pretreated DNA are amplified, using sets of primer oligonucleotides according to the present invention, and a, preferably heat-stable polymerase. Because of statistical and practical considerations, preferably more than ten different fragments having a length of 100-2000 base pairs are amplified. The amplification of several DNA segments can be carried out simultaneously in one and the same reaction vessel. Usually, the amplification is carried out by means of a polymerase chain reaction (PCR).

[0039] In a preferred embodiment of the method, the set of primer oligonucleotides includes at least two oligonucleotides whose sequences are each reverse complementary or identical to an at least 18 base-pair long segment of the base sequences specified in the appendix (Seq. ID No.1 through Seq. ID No.120). The primer oligonucleotides are preferably characterized in that they do not contain any CpG dinucleotides. In a particularly preferred embodiment of the method, the sequence of said primer oligonucleotides are designed so as to selectively anneal to and amplify, only the astrocytoma and/or brain tissue specific DNA of interest, thereby minimizing the amplification of background or non relevant DNA. In the context of the present invention, background DNA is taken to mean genomic DNA which does not have a relevant tissue specific methylation pattern, in this case the relevant tissue being brain tissue, more specifically astrocyte or astrocytoma tissue. Examples of such primers used in the examples are contained in Table 1.

[0040] According to the present invention, it is preferred that at least one primer oligonucleotide is bound to a solid phase during amplification. The different oligonucleotide and/or PNA-oligomer sequences can be arranged on a plane solid phase in the form of a rectangular or hexagonal lattice, the solid phase surface preferably being composed of silicon, glass, polystyrene, aluminum, steel, iron, copper, nickel, silver, or gold, it being possible for other materials such as nitrocellulose or plastics to be used as well.

[0041] The fragments obtained by means of the amplification can carry a directly or indirectly detectable label. Preferred are labels in the form of fluorescence labels, radionuclides, or detachable molecule fragments having a typical mass which can be detected in a mass spectrometer, it being preferred that the fragments that are produced have a single positive or negative net charge for better detectability in the mass spectrometer. The detection may be carried out and visualized by means of matrix assisted laser desorption/ionization mass spectrometry (MALDI) or using electron spray mass spectrometry (ESI).

[0042] The amplificates obtained in the second step of the method are subsequently hybridized to an array or a set of oligonucleotides and/or PNA probes. In this context, the hybridization takes place in the manner described in the following. The set of probes used during the hybridization is preferably composed of at least 10 oligonucleotides or PNA-oligomers. In the process, the amplificates serve as probes which hybridize to oligonucleotides previously bonded to a solid phase. The non-hybridized fragments are subsequently removed. Said oligonucleotides contain at least one base sequence having a length of 13 nucleotides which is reverse complementary or identical to a segment of the base sequences specified in the appendix, the segment containing at least one CpG dinucleotide. The cytosine of the CpG dinucleotide is the 5^{th} to 9^{th} nucleotide from the 5′-end of the 13-mer. One oligonucleotide exists for each CpG dinucleotide. Said PNA-oligomers contain at least one base sequence having a length of 9 nucleotides which is reverse complementary or identical to a segment of the base sequences specified in the appendix, the segment containing at least one CpG dinucleotide. The cytosine of the CpG dinucleotide is the 4^{th} to 6^{th} nucleotide seen from the 5′-end of the 9-mer. Preferably one oligonucleotide exists for each CpG dinucleotide.

[0043] In the fifth step of the method, the non-hybridized amplificates are removed.

[0044] In the final step of the method, the hybridized amplificates are detected. In this context, it is preferred that labels attached to the amplificates are identifiable at each position of the solid phase at which an oligonucleotide sequence is located.

[0045] According to the present invention, it is preferred that the labels of the amplificates are fluorescence labels, radionuclides, or detachable molecule fragments having a typical mass which can be detected in a mass spectrometer. The mass spectrometer is preferred for the detection of the amplificates, fragments of the amplificates or of probes which are complementary to the amplificates, it being possible for the detection to be carried out and visualized by means of matrix assisted laser desorption/ionization mass spectrometry (MALDI) or using electron spray mass spectrometry (ESI). The produced fragments may have a single positive or negative net charge for better detectability in the mass spectrometer.

[0046] The aforementioned method is preferably used for ascertaining genetic and/or epigenetic parameters of genomic DNA.

[0047] The oligomers according to the present invention or arrays thereof as well as a kit according to the present invention are intended to be used for the characterisation, classification, differentiation, grading, staging and/or diagnosis of astrocytomas. More preferably for the differentiation of Grade I and II astrocytomas, or diagnosis of predisposition to astrocytomas. According to the present invention, the method is preferably used for the analysis of important genetic and/or epigenetic parameters within genomic DNA, in particular for use in characterisation, classification, differentiation, grading, staging and/or diagnosis of astrocytomas, and predisposition to astrocytomas.

[0048] The method according to the present invention is used, for example, for characterisation, classification, differentiation, grading, staging and/or diagnosis of astrocytomas.

[0049] The nucleic acids according to the present invention of Seq. ID No.1 through Seq. ID No.120 can be used for characterisation, classification, differentiation, grading, staging and/or diagnosis of genetic and/or epigenetic parameters of genomic DNA, in particular for use in differentiation of Grade I and II astrocytomas.

[0050] The present invention moreover relates to a method for manufacturing a diagnostic reagent and/or therapeutic agent for characterisation, classification, differentiation, grading, staging and/or diagnosis of astrocytomas by analyzing methylation patterns of genomic DNA. The diagnostic reagent and/or therapeutic agent being characterized in that at least one nucleic acid according to the present invention (sequence IDs 1 through 120) is used for manufacturing it, preferably together with suitable additives and auxiliary agents.

[0051] A further subject matter of the present invention relates to a diagnostic reagent and/or therapeutic agent for astrocytoma by analyzing methylation patterns of genomic DNA, in particular for use in differentiation of Grade I and II astrocytomas, or diagnosis of the predisposition to brain tumors, the diagnostic reagent and/or therapeutic agent containing at least one nucleic acid according to the present invention (sequence IDs 1 through 120), preferably together with suitable additives and auxiliary agents.

[0052] The present invention moreover relates to the diagnosis and/or prognosis of events which are disadvantageous or relevant to patients or individuals in which important genetic and/or epigenetic parameters within genomic DNA, said parameters obtained by means of the present invention may be compared to another set of genetic and/or epigenetic parameters, the differences serving as the basis for a diagnosis and/or prognosis of events which are disadvantageous or relevant to patients or individuals.

[0053] In the context of the present invention the term “hybridization” is to be understood as a bond of an oligonucleotide to a completely complementary sequence along the lines of the Watson-Crick base pairings in the sample DNA, forming a duplex structure.

[0054] The term “functional variants” denotes all DNA sequences which are complementary to a DNA sequence, and which hybridize to the reference sequence under stringent conditions.

[0055] In the context of the present invention, “genetic parameters” are mutations and polymorphisms of genomic DNA and sequences further required for their regulation. To be designated as mutations are, in particular, insertions, deletions, point mutations, inversions and polymorphisms and, particularly preferred, SNPs (single nucleotide polymorphisms).

[0056] In the context of the present invention, “epigenetic parameters” are, in particular, cytosine methylations and further chemical modifications of DNA bases of genomic DNA and sequences further required for their regulation. Further epigenetic parameters include, for example, the acetylation of histones which, cannot be directly analyzed using the described method but which, in turn, correlates with the DNA methylation.

[0057] In the context of the present invention, the term ‘treatment’ as applied to astrocytomas is taken to include planning of suitable methods of patient treatment (e.g. surgery, radiation therapy, chemotherapy).

[0058] In the following, the present invention will be explained in greater detail on the basis of the sequences and examples with reference to the accompanying figures without being limited thereto.

[0059] FIG. 1

[0060] FIG. 1 shows the hybridisation of fluorescent labelled amplificates to a surface bound olignonucleotide. Sample I being from astrocytoma grade I (brain tumor) tissue and sample II being from astrocytoma grade II (brain tumor) tissue. Flourescence at a spot indicates hybridisation of the amplificate to the olignonucleotide. Hybridisation to a CG olignonucleotide denotes methylation at the cytosine position being analysed, hybridisation to a TG olignonucleotide denotes no methylation at the cytosine position being analysed. It can be seen that Sample I was umethylated for CG positions (as indicated in example (1-4) of the amplificates of the genes TGF-alpha (cf. FIG. 1A), MLH1 (cf. FIG. 1B), NF1 (cf. FIG. 1C) and CSKN2B (FIG. 1D) whereas in comparison Sample II had a higher degree of methylation at the same position.

[0061] FIG. 2

[0062] Differentiation of healthy control samples (labelled I) and astrocytoma grade I (labelled II) (FIG. 2A), and healthy control sample and astrocytoma grade II (labelled III) (FIG. 2B). High probability of methylation corresponds to red, uncertainty to black and low probability to green. The labels on the left side of the plot are gene identifiers, the first 3 digits may be referenced in Table 1. The hybridisation was done with Cy5 labelled amplificates generated by multiplex PCR reactions as shown in Table 1. The labels on the right side give the significance (p-value, T-test) of the difference between the means of the two groups. Each row corresponds to a single CpG and each column to the methylation levels of one sample. CpGs are ordered according to their contribution to the distinction to the differential diagnosis of the two lesions with increasing contribution from top to bottom.

[0063] FIG. 3

[0064] Differentiation of astrocytoma grade I (1) and astrocytoma grade II (2). High probability of methylation corresponds to red, uncertainty to black and low probability to green. The labels on the left side of the plot are gene and CpG identifiers. The hybridisation was done with Cy5 labelled amplificates generated by multiplex PCR reactions as shown in Table 1. The labels on the right side give the significance (p-value, T-test) of the difference between the means of the two groups. Each row corresponds to a single CpG and each column to the methylation levels of one sample. CpGs are ordered according to their contribution to the distinction to the differential diagnosis of the two lesions with increasing contribution from top to bottom.

[0065] FIG. 4

[0066] Separation of astrocytoma grade I (I) and astrocytoma grade II (II). High probability of methylation corresponds to red, uncertainty to black and low probability to green. The labels on the left side of the plot are gene and CpG identifiers. The hybridisation was done with Cy5 labelled amplificates of the genes MLHI, TGF-alpha and NF1, all generated by single gene PCR reactions. Each row corresponds to a single CpG and each column to the methylation levels of one sample. CpGs are ordered according to their contribution to the distinction to the differential diagnosis of the two lesions with increasing contribution from top to bottom.

### SEQ. ID NO. 1 THROUGH SEQ. ID NO. 120

[0067] Sequences having odd sequence numbers (e.g., Seq. ID No. 1, 3, 5, . . . ) exhibit in each case sequences of chemically pretreated genomic DNAs. Sequences having even sequence numbers (e.g., Seq. ID No. 2, 4, 6, . . . ) exhibit in each case the sequences of chemically pretreated genomic DNAs. Said genomic DNAs are complementary to the genomic DNAs from which the preceeding sequence was derived (e.g., the complementary sequence to the genomic DNA from which Seq. ID No.1 is derived is the genomic sequence from which Seq. ID No.2 is derived, the complementary sequence to the genomic DNA from which Seq. ID No.3 is derived is the sequence from which Seq. ID No.4 is derived, etc.)

### SEQ. ID NO. 121 THROUGH SEQ. ID NO. 136

[0068] Seq. ID No. 121 through Seq. ID No. 136 show the sequences of oligonucleotides that are used in the following Examples.

### EXAMPLE 1

[0069] Methylation Analysis of the Gene TGF-Alpha.

[0070] The following example relates to a fragment of the gene TGF-alpha in which a specific CG-position is to be analyzed for methylation.

[0071] In the first step, a genomic sequence is treated using bisulfite (hydrogen sulfite, disulfite) in such a manner that all cytosines which are not methylated at the 5-position of the base are modified in such a manner that a different base is substituted with regard to the base pairing behavior while the cytosines methylated at the 5-position remain unchanged.

[0072] If bisulfite solution is used for the reaction, then an addition takes place at the non-methylated cytosine bases. Moreover, a denaturating reagent or solvent as well as a radical interceptor must be present. A subsequent alkaline hydrolysis then gives rise to the conversion of non-methylated cytosine nucleobases to uracil. The chemically converted DNA is then used for the detection of methylated cytosines. In the second method step, the treated DNA sample is diluted with water or an aqueous solution. Preferably, the DNA is subsequently desulfonated. In the third step of the method, the DNA sample is amplified in a polymerase chain reaction, preferably using a heat-resistant DNA polymerase. In the present case, cytosines of the gene TGF-alpha are analyzed. To this end, a defined fragment having a length of 533 bp is amplified with the specific primer oligonucleotides GGTTTGTTTGGGAGGTAAG (Sequence ID 121) and CCCCCTAAAAACACAAAA (Sequence ID No. 122). The single gene PCR reaction was performed on a thermocycler (Epperdorf GmbH) using bisulfite DNA 10 ng, primer 6 pmole each, dNTP 200 μM each, 1.5 mM MgCl2 and 1 U HotstartTaq (Qiagen AG). The other conditions were as recommended by the Taq polymerase manufacturer. In the multiplex PCR up to 16 primer pairs were used within the PCR reaction. The multiplex PCR was done according the single gene PCR with the following modifications: primer 0.35 pmole each, dNTP 800 μM each and 4.5 mM MgCl2. The cycle program for single gene PCR and multiplex PCR was as followed: step 1,14 min 96° C.; step 2, 60 sec 96° C.; step 3, 45 sec 55° C.; step 4 ,75 sec 72° C.; step 5, 10 min 72° C.; the step 2 to step 4 were repeated 39 fold.

[0073] The amplificate serves as a sample which hybridizes to an oligonucleotide previously bound to a solid phase, forming a duplex structure, for example AAGTTAGGCGTTTTTTGT (Sequence ID No. 123), the cytosine to be detected being located at position 382 of the amplificate. The detection of the hybridization product is based on Cy3 and Cy5 fluorescently labelled primer oligonucleotides which have been used for the amplification. A hybridization reaction of the amplified DNA with the oligonucleotide takes place only if a methylated cytosine was present at this location in the bisulfite-treated DNA. Thus, the methylation status of the specific cytosine to be analyzed is inferred from the hybridization product.

[0074] In order to verify the methylation status of the position, a sample of the amplificate is further hybridized to another oligonucleotide previously bonded to a solid phase. Said olignonucleotide is identical to the oligonucleotide previously used to analyze the methylation status of the sample, with the exception of the position in question. At the position to be analysed said oligonucleotide comprises a thymine base as opposed to a cytosine base i.e AAGTTAGGTGTTTTTTGT (Sequence ID No. 124). Therefore, the hybridisation reaction only takes place if an unmethylated cytosine was present at the position to be analysed.

### EXAMPLE 2

[0075] Methylation Analysis of the Gene NF1.

[0076] The following example relates to a fragment of the gene NF1 in which a specific CG-position is to be analyzed for methylation.

[0077] In the first step, a genomic sequence is treated using bisulfite (hydrogen sulfite, disulfite) in such a manner that all cytosines which are not methylated at the 5-position of the base are modified in such a manner that a different base is substituted with regard to the base pairing behavior while the cytosines methylated at the 5-position remain unchanged.

[0078] If bisulfite solution is used for the reaction, then an addition takes place at the non-methylated cytosine bases. Moreover, a denaturating reagent or solvent as well as a radical interceptor must be present. A subsequent alkaline hydrolysis then gives rise to the conversion of non-methylated cytosine nucleobases to uracil. The chemically converted DNA is then used for the detection of methylated cytosines. In the second method step, the treated DNA sample is diluted with water or an aqueous solution. Preferably, the DNA is subsequently desulfonated. In the third step of the method, the DNA sample is amplified in a polymerase chain reaction, preferably using a heat-resistant DNA polymerase. In the present case, cytosines of the gene NF1 are analyzed. To this end, a defined fragment having a length of 600 bp is amplified with the specific primer oligonucleotides TTGGGAGAAAGGTTAGTTTT (Sequence ID 129) and ATACAAACTCCCAATATTCC (Sequence ID No. 130). The single gene PCR reaction was performed on a thermocycler (Epperdorf GmbH) using bisulfite DNA 10 ng, primer 6 pmole each, dNTP 200 μM each, 1.5 mM MgCl2 and 1 U HotstartTaq (Qiagen AG). The other conditions were as recommended by the Taq polymerase manufacturer. In the multiplex PCR up to 16 primer pairs were used within the PCR reaction. The multiplex PCR was done according the single gene PCR with the following modifications: primer 0.35 pmole each, dNTP 800 μM each and 4,5 mM MgC12. The cycle program for single gene PCR and multiplex PCR was as followed: step 1,14 min 96° C.; step 2, 60 sec 96° C; step 3, 45 sec 55° C.; step 4, 75 sec 72° C.; step 5, 10 min 72° C.; the step 2 to step 4 were repeated 39 fold.

[0079] The amplificate serves as a sample which hybridizes to an oligonucleotide previously bound to a solid phase, forming a duplex structure, for example AATTAAAACGCCCTAAAA (Sequence ID No. 131), the cytosine to be detected being located at position 24 of the amplificate. The detection of the hybridization product is based on Cy3 and Cy5 fluorescently labelled primer oligonucleotides which have been used for the amplification. A hybridization reaction of the amplified DNA with the oligonucleotide takes place only if a methylated cytosine was present at this location in the bisulfite-treated DNA. Thus, the methylation status of the specific cytosine to be analyzed is inferred from the hybridization product.

[0080] In order to verify the methylation status of the position, a sample of the amplificate is further hybridized to another oligonucleotide previously bonded to a solid phase. Said olignonucleotide is identical to the oligonucleotide previously used to analyze the methylation status of the sample, with the exception of the position in question. At the position to be analysed said oligonucleotide comprises a thymine base as opposed to a cytosine base i.e. AATTAAAACACCCTAAAA (Sequence ID No. 132). Therefore, the hybridisation reaction only takes place if an unmethylated cytosine was present at the position to be analysed.

### EXAMPLE 3

[0081] Methylation Analysis of the Gene MLH1.

[0082] The following example relates to a fragment of the gene MLH1 in which a specific CG-position is to be analyzed for methylation.

[0083] In the first step, a genomic sequence is treated using bisulfite (hydrogen sulfite, disulfite) in such a manner that all cytosines which are not methylated at the 5-position of the base are modified in such a manner that a different base is substituted with regard to the base pairing behavior while the cytosines methylated at the 5-position remain unchanged.

[0084] If bisulfite solution is used for the reaction, then an addition takes place at the non-methylated cytosine bases. Moreover, a denaturating reagent or solvent as well as a radical interceptor must be present. A subsequent alkaline hydrolysis then gives rise to the conversion of non-methylated cytosine nucleobases to uracil. The chemically converted DNA is then used for the detection of methylated cytosines. In the second method step, the treated DNA sample is diluted with water or an aqueous solution. Preferably, the DNA is subsequently desulfonated. In the third step of the method, the DNA sample is amplified in a polymerase chain reaction, preferably using a heat-resistant DNA polymerase. In the present case, cytosines of the gene MLHI are analyzed. To this end, a defined fragment having a length of 568 bp is amplified with the specific primer oligonucleotides TTTAAGGTAAGAGAATAGGT (Sequence ID 133) and TTAACCCTACTCTTATAACC (Sequence ID No. 134). The single gene PCR reaction was performed on a thermocycler (Epperdorf GmbH) using bisulfite DNA 10 ng, primer 6 pmole each, dNTP 200 μM each, 1.5 mM MgCl2 and 1 U HotstartTaq (Qiagen AG). The other conditions were as recommended by the Taq polymerase manufacturer. In the multiplex PCR up to 16 primer pairs were used within the PCR reaction. The multiplex PCR was done according the single gene PCR with the following modifications: primer 0.35 pmole each, dNTP 800 μM each and 4.5 mM MgCl2. The cycle program for single gene PCR and multiplex PCR was as followed: step 1,14 min 96° C.; step 2, 60 sec 96° C.; step 3, 45 sec 55° C.; step 4 ,75 sec 72° C.; step 5, 10 min 72° C.; the step 2 to step 4 were repeated 39 fold.

[0085] The amplificate serves as a sample which hybridizes to an oligonucleotide previously bound to a solid phase, forming a duplex structure, for example TTGTAGGACGTTTATATG (Sequence ID No. 135), the cytosine to be detected being located at position 125 of the amplificate. The detection of the hybridization product is based on Cy3 and Cy5 fluorescently labelled primer oligonucleotides which have been used for the amplification. A hybridization reaction of the amplified DNA with the oligonucleotide takes place only if a methylated cytosine was present at this location in the bisulfite-treated DNA. Thus, the methylation status of the specific cytosine to be analyzed is inferred from the hybridization product.

[0086] In order to verify the methylation status of the position, a sample of the amplificate is further hybridized to another oligonucleotide previously bonded to a solid phase. Said olignonucleotide is identical to the oligonucleotide previously used to analyze the methylation status of the sample, with the exception of the position in question. At the position to be analysed said oligonucleotide comprises a thymine base as opposed to a cytosine base i.e TTGTAGGATGTTTATATG (Sequence ID No. 136). Therefore, the hybridisation reaction only takes place if an unmethylated cytosine was present at the position to be analysed.

### EXAMPLE 4

[0087] Methylation Analysis of the Gene CSNK2B.

[0088] The following example relates to a fragment of the gene CSNK2B in which a specific CG-position is to be analyzed for methylation.

[0089] In the first step, a genomic sequence is treated using bisulfite (hydrogen sulfite, disulfite) in such a manner that all cytosines which are not methylated at the 5-position of the base are modified in such a manner that a different base is substituted with regard to the base pairing behavior while the cytosines methylated at the 5-position remain unchanged.

[0090] If bisulfite solution is used for the reaction, then an addition takes place at the non-methylated cytosine bases. Moreover, a denaturating reagent or solvent as well as a radical interceptor must be present. A subsequent alkaline hydrolysis then gives rise to the conversion of non-methylated cytosine nucleobases to uracil. The chemically converted DNA is then used for the detection of methylated cytosines. In the second method step, the treated DNA sample is diluted with water or an aqueous solution. Preferably, the DNA is subsequently desulfonated. In the third step of the method, the DNA sample is amplified in a polymerase chain reaction, preferably using a heat-resistant DNA polymerase. In the present case, cytosines of the gene CSNK2B are analyzed. To this end, a defined fragment having a length of 524 bp is amplified with the specific primer oligonucleotides GGGGAAATGGAGAAGTGTAA (Sequence ID 125) and CTACCAATCCCAAAATAACC (Sequence ID No. 126). The single gene PCR reaction was performed on a thermocycler (Epperdorf GmbH) using bisulfite DNA 10 ng, primer 6 pmole each, dNTP 200 μM each, 1.5 mM MgCl2 and 1 U HotstartTaq (Qiagen AG).

[0091] The other conditions were as recommended by the Taq polymerase manufacturer. In the multiplex PCR up to 16 primer pairs were used within the PCR reaction. The multiplex PCR was done according the single gene PCR with the following modifications: primer 0.35 pmole each, dNTP 800 μM each and 4.5 mM MgC12. The cycle program for single gene PCR and multiplex PCR was as followed: step 1,14 min 96° C.; step 2, 60 sec 96° C.; step 3, 45 sec 55 ° C.; step 4,75 sec 72° C.; step 5, 10 min 72° C.; the step 2 to step 4 were repeated 39 fold.

[0092] The amplificate serves as a sample which, hybridizes to an oligonucleotide previously bound to a solid phase, forming a duplex structure, for example TAGGTTAGCGTATTGGGA (Sequence ID No. 127), the cytosine to be detected being located at position 50 of the amplificate. The detection of the hybridization product is based on Cy3 and Cy5 fluorescently labelled primer oligonucleotides which have been used for the amplification. A hybridization reaction of the amplified DNA with the oligonucleotide takes place only if a methylated cytosine was present at this location in the bisulfite-treated DNA. Thus, the methylation status of the specific cytosine to be analyzed is inferred from the hybridization product.

[0093] In order to verify the methylation status of the position, a sample of the amplificate is further hybridized to another oligonucleotide previously bonded to a solid phase. Said olignonucleotide is identical to the oligonucleotide previously used to analyze the methylation status of the sample, with the exception of the position in question. At the position to be analysed said oligonucleotide comprises a thymine base as opposed to a cytosine base i.e. TAGGTTAGTGTATTGGGA (Sequence ID No. 128). Therefore, the hybridisation reaction only takes place if an unmethylated cytosine was present at the position to be analysed.

### EXAMPLE 5

[0094] Differentiation of Healthy Samples and Astrocytoma Grade I and Grade II Tumours Isolated from Cerebrum

[0095] In order to relate the methylation patterns to a specific tumour type, it is initially required to comparatively analyze the DNA methylation patterns of two groups of patients with alternative forms of a tumor, in this case one group of astrocytoma grade I and another group of astrocytoma grade II, with those of healthy tissue (FIGS. 2A and B). These analyses were carried out, analogously to Examples 1-4. The results obtained in this manner are stored in a database and the CpG dinucleotides which are methylated differently between the two groups are identified. This can be carried out by determining individual CpG methylation rates as can be done, for example, by sequencing, which is a relatively imprecise method of quantifying methylation at a specific CpG, or else, in a very precise manner, by a methylation-sensitive “primer extension reaction”. In a particularly preferred variant, as illustrated in the preceeding examples the methylation status of hundreds or thousands of CpGs may be analysed on an oligomer array. It is also possible for the patterns to be compared, for example, by clustering analyses which can be carried out, for example, by a computer.

[0096] All clinical specimens were obtained at time of surgery, i.e. in a routine clinical situation (Santourlidis, S., Prostate 39:166-174, 1999, Florl, A. R., Br. J. Cancer 80:1312-1321, 1999). A panel of genomic fragments from 64 different genes (listed in Table 1) were bisulphite treated and amplified by 6 sets of multplex PCRs (mPCR) according to Example 1. The mPCR reactions (I,J,K,L,M,N) of the genomic, bisulphite treated DNA was done using the combination of primer pairs as indicated in Table 1. However, as will be obvious to one skilled in the art, it is also possible to use other primers that amplify the genomic, bisulphite treated DNA in an adequate manner. However the primer pairs as listed in Table 1 are particularly preferred. In order to differentiate astrocytoma grade I from healthy control samples optimal results were obtained by including at least 6 CpG dinucleotides, the most informative CpG positions for this discrimination being located within the OAT, GP1B, cMyc,UNG,TIMP3 and cABL genes (cf. FIG. 2A, Tab1). In order to differentiate astrocytoma grade I from healthy control samples optimal results were obtained by including at least 6 CpG dinucleotides, the most informative CpG positions for this discrimination being located within the cMyc, EGR4, ApoA1, AR and heatshock genes (cf. FIG. 2B, Tab1). In addition, the majority of the analysed CpG dinucleotides of the panel showed different methylation patterns between the two phenotypes. The results prove that methylation fingerprints are capable of providing differential diagnosis of solid malignant tumours and could therefore be applied in a large number clinical situations

### EXAMPLE 6

[0097] Differentiation of Astrocytoma Grade I and Grade II Tumours

[0098] In order to relate the methylation patterns to a specific tumour type, it is initially required to analyze the DNA methylation patterns of two groups of patients with alternative forms of a tumor, in this case one group of astrocytoma grade I and another group of astrocytoma grade II. These analyses were carried out, analogously to Example 1. The results obtained in this manner are stored in a database and the CpG dinucleotides which are methylated differently between the two groups are identified. This can be carried out by determining individual CpG methylation rates as can be done, for example, by sequencing, which is a relatively imprecise method of quantifying methylation at a specific CpG, or else, in a very precise manner, by a methylation-sensitive “primer extension reaction”. In a particularly preferred variant, as illustrated in examples 1 to 4 the methylation status of hundreds or thousands of CpGs may be analysed on an oligomer array. It is also possible for the patterns to be compared, for example, by clustering analyses which can be carried out, for example, by a computer.

[0099] All clinical specimens were obtained at time of surgery, i.e. in a routine clinical situation (Santourlidis, S., Prostate 39:166-174, 1999, Florl, A. R., Br. J. Cancer 80:1312-1321, 1999). A panel of genomic fragments from 56 different genes (listed in Table 1) were bisulphite treated and amplified by 6 sets of multplex PCRs (mPCR), named I,J,K,L,M and N, in Table 1, according to Example 1. The mPCR reactions of the genomic, bisulphite treated DNA was done using the combination of primer pairs as indicated in Table 1. It will be obvious to one skilled in the art, that it is also possible to use other primers that amplify the genomic, bisulphite treated DNA in an adequate manner. However the primer pairs as listed in Table 1 are particularly preferred. Optimal results were obtained by including at least 8 CpG dinucleotides, the most informative CpG positions for this discrimination being located within the CSKNB2, NF1, MlH1, EGR4, AR; TGF-alpha, and APOC2 genes (cf. FIG. 3). In addition, the majority of the analysed CpG dinucleotides of the panel showed different methylation patterns between the two phenotypes. The results prove that methylation fingerprints are capable of providing differential diagnosis of solid malignant tumours and could therefore be applied in a large number clinical situations.

### EXAMPLE 7

[0100] Differentiation of Astrocytoma Grade I and Grade II Tumours Using DNA Fragments Derived from TGF-Alpha, NF1 and MlH1 Gene.

[0101] The methylation patterns of CpG islands derived from TGF-alpha, NF1 and MlH1 genes were analysed. In order to evaluate the genes, already identified differentiating astrocytoma grade I and grade II tumours in the class prediction approach (cf. Example 6) The genes TGF-alpha, NF1 and MlH1 gene were amplified from genomic bisulfite treated DNA as described in examples 1,2 and 3. The DNA was prepared from tissue samples of two groups of patients with alternative forms of a tumor, in this case one group of astrocytoma grade I and another group of astrocytoma grade II. Optimal results were obtained by including at least 6 CpG dinucleotides, the most informative CpG positions for this discrimination being located within the TGF-alpha and NF1 and MlH1 genes (cf FIG. 4). The results further validate the results of methylation fingerprints shown in example 6.

TABLE 1
List of genes, reference numbers and primer oligonucleotides
according to Examples 1-7 and FIGS. 1-4.

| | | | | |
|---|---|---|---|---|
| GENE ID | MPCR SET | GENE | PCR PRIMER | PCR PRIMER |

| | | | | |
|---|---|---|---|---|
| 81 | N | ADCKYAP1 | GGTGGATTTATGGTTA | TCCCTCCCTTACCCTTCAAC |
| | | | TTTTG | |
| 292 | K | AFP | AGGTTTATTGAATATTT | AACATATTTCCACAACATCC |
| | | | AGG | |
| 85 | L | ANT1 | GTTTAAGGTTGTTTGTG | CCTCCTCCCAACTACAAAA |
| | | | TTATAAAT | |
| 48 | L | APOA1 | GTTGGTGGTGGGGGAG | ACAACCAAAATCTAAACTAA |
| | | | GTAG | |
| 50 | N | APOC2 | ATGAGTAGAAGAGGTG | CCCTAAATCCCTTTCTTACC |
| | | | ATAT | |
| 87 | K | AR | GTAGTAGTAGTAGTAA | ACCCCCTAAATAATTATCCT |
| | | | GAGA | |
| 1143 | L | ATP5A1 | AGTTTGTTTTAATTTAT | AACAACATCTTTACAATTACTCC |
| | | | TGATAGGA | |
| 1011 | L | CABL | GGTTGGGAGATTTAAT | ACCAATCCAAACTTTTCCTT |
| | | | TTTATT | |
| 77 | L | CD1A | ATTATGGTTGGAATTG | ACAAAAACAACAAACACCCC |
| | | | TAAT | |
| 1079 | L | CD63 | TGGGAGATATTTAGGA | CTCACCTAAACTTCCCAAA |
| | | | TGTGA | |
| 99 | M | CDC25A | AGAAGTTGTTTATTGA | AAATTAAATCCAAACAAAC |
| | | | TTGG | |
| 187 | L | CDH3 | GTTTAGAAGTTTAAGA | CAAAAACTCAACCTCTATCT |
| | | | TTAG | |
| 88 | K | CDK4 | TTTTGGTAGTTGGTTAT | AAAAATAACACAATAACTCA |
| | | | ATG | |
| 310 | I | CFOS | TTTTGAGTTTTAGAATT | AAAAACCCCCTACTCATCTACTA |
| | | | GTTTTTAG | |
| 1034 | L | CMYC | TTTTGTGTGGAGGGTA | CCCCAAATAAACAAAATAACC |
| | | | GTTG | |
| 312 | K | CMYC | TTGTTTTTGTGGAAAA | TTTCAATCTCAAAACTCAACC |
| | | | GAGG | |
| 313 | I | CMYC | AAAGGTTTGGAGGTAG | TTCCTTTCCAAATCCTCTTT |
| | | | GAGT | |
| 37 | M | CRIP1 | TTTAGGTTTAGGGTTTA | CCACTCCAAAACTAATATCA |
| | | | GTT | |
| 70 | N | CSF1 | TAGGGTTTGGAGGGAA | AAAAATCACCCTAACCAAAC |
| | | | AG | |
| 78 | M | CSNK2B | GGGGAAATGGAGAAG | CTACCAATCCCAAAATAACC |
| | | | TGTAA | |
| 272 | N | CTLA4 | TTTTTATGGAGAGTAG | TAACTTTACTCACCAATTAC |
| | | | TTGG | |
| 287 | K | DAD1 | TTTTGTTGTTAGAGTAA | ACCTCAATTTCCCCATTCAC |
| | | | TTG | |
| 147 | I | DAPK1 | ATTAATATTATGTAAA | CTTACAACCATTCACCCACA |
| | | | GTGA | |
| 319 | J | E-CADHERIN | GGGTGAAAGAGTGAGT | ACTCCAAAAACCCATAACTAA |
| | | | TTTATTT | |
| 63 | M | EGFR | GGTGTTTGATAAGATT | CCCTTACCTTTCTTTTCCT |
| | | | TGAAG | |
| 311 | I | EGFR | GGGTAGTGGGATATTT | CCAACACTACCCCTCTAA |
| | | | AGTTTTT | |
| 82 | M | EGR4 | AGGGGGATTGAGTGTT | CCCAAACATAAACACAAAAT |
| | | | AAGT | |
| 1012 | L | ELK1 | AAGTGTTTTAGTTTTTA | CAAACCCAAAACTCACCTAT |
| | | | ATGGGTA | |
| 307 | J | ERBB2 | GAGTGATATTTTTTATTT | AAAACCCTAACTCAACTACTCAC |
| | | | TATGTTTGG | |
| 308 | K | ERBB2 | GAGTTTGGGAGTTTAA | TCAACTTCACAACTTCATTCTTAT |
| | | | GATTAGT | |
| 130 | N | GP1B | GGTGATAGGAGAATAA | CTCCCAACTACAACCAAAC |
| | | | TGTTGG | |
| 290.2 | M | HEAT SHOCK | AGAGGAGATATTTTTT | AAAATCCTACAACAACTTC |
| | | | ATGG | |
| 290.3 | J | HEAT SHOCK | AAGGATAATAATTTGT | CTTAAATACAAACTTAATCC |
| | | | TGGG | |
| 89 | I | HUMOS | TTTATTGATTGGGAGT | CTAATTTACAAACATCCTA |
| | | | AGGT | |
| 1083 | N | IL13 | TTTTTAGGGTAGGGGT | CCTTATCCCCCATAACCA |
| | | | TGT | |
| 1010 | L | LMYC | AGGTTTGGGTTATTGA | CATTATTTCCTAACTACCTTATAT |
| | | | GTTT | CTC |
| 291 | L | MC2R | ATATTTGATATGTTGG | ACCTACTACAAAAAATCATC |
| | | | GTAG | |
| 314.2 | I | MGMT | AAGGTTTTAGGAAGA | ACTCCCAATACCTCACAATATAA |
| | | | GTGTTT | C |
| 427 | K | MHC | GGGTATTAGGAATTTA | CAAAACACCTTCCTAACTCA |
| | | | TGTG | |
| 401 | I | MHC | TTGTTGTTTTTAGGGGT | TCCTTCCCATTCTCCAAATATC |
| | | | TTTGG | |
| 458 | M | MHC | AAGAGAGTGAGAAGTAG | CTACTCTCTAAAACTCCAAAC |
| | | | AGGGTT | |
| 487 | M | MHC | GAGGTTAAAGGAAGTT | AAACTAAATTCTCCCAATACC |
| | | | TTGGA | |
| 465 | L | MHC | ATTGATAGGTAGTTAG | AAAAAACTCTCATAAATCTCA |
| | | | ATTGG | |
| 451 | M | MHC | ACGGAGGAAGGGTTAAT | ATCTTCCTACTACTATCTCTAAC |
| | | | AAAGA | |
| 441 | M | MHC | AGGTTGGATTTTGGGT | TCTCCTACTCTCCTAATCTC |
| | | | AGGT | |
| 160 | M | MLH1 | TTTAAGGTAAGAGAAT | TTAACCCTACTCTTATAACC |
| | | | AGGT | |
| 94 | N | N33 | TGGAGGAGATATTGTT | TTTTTCAAATCAAAACCCTACT |
| | | | TTGT | |
| 302 | J | NF1 | TTGGGAGAAAGGTTAG | ATACAAACTCCCAATATTCC |
| | | | TTTT | |
| 1009 | L | NMYC | GGAGGAGTATATTTTG | ACAAACCCTACTCCTTACCTC |
| | | | GGTTT | |
| 1018 | N | NUC | AAGTTTGTGTTTTTAAA | AAAAACTAAACCTACCCAATAA |
| | | | AGGGTTA | |
| 1007 | N | OAT | TGGAGGTGGATTTAGA | ACCAAAACCCCAAAACAA |
| | | | GGTA | |
| 304 | J | P16 | AGGGGTTGGTTGGTTA | TAATTCCAATTCCCCTACAA |
| | | | TTAG | |
| 305 | J | P53 | GTGATAAGGGTTGTGA | CAAAAACTTACCCAATCCAA |
| | | | AGGA | |
| 1069 | N | POMC | AGTTTTTAAATAATGG | ACTCTTCTTCCCCTCCTTC |
| | | | GGAAAT | |
| 177 | N | PRG | AGTTGAAGTTATAAGG | AATAAAAACTCTCAAAAACC |
| | | | GGTG | |
| 26 | K | SOD1 | AGGGGAAGAAAAGGT | CCCACTCTAACCCCAAACCA |
| | | | AAGTT | |
| 303 | I | TGF-A | GGTTTGTTTGGGAGGT | CCCCCTAAAAACACAAAA |
| | | | AAG | |
| 301 | J | TGF-B1 | GGGGAGTAATATGGAT | CCTTTACTAAACACCTCCCATA |
| | | | TTGG | |
| 317 | I | TIMP3 | GTAAGGGTTTTGTGTT | CCCCCTCAAACCAATAAC |
| | | | GTTT | |
| 128 | N | TNFB | TTTTTGTTTTTGATTGA | AAAAACCCCAAAATAAACAA |
| | | | AATAGTAG | |
| 35 | L | UBB | TTAAGTTATTTTAGGTG | ACCAAAATCCTACCAATCAC |
| | | | GAGTTTA | |
| 1140 | N | UNG | GTTGGGGTGTTTGAGG | CCTCTCCCCTCTAATTAAACA |
| | | | AA | |
| 300 | J | VEGF | TGGGTAATTTTAGGTT | CCCCAAAAACAAATCACTC |
| | | | GTGA | |
| 118 | K | WT1 | AAAGGGAAATTAAGTG | TAACTACCCTCAACTTCCC |
| | | | TTGT | |

The application's sequence listing, which the Patent Office published only in electronic form, follows.

SEQUENCE LISTING (136 sequences)

SEQ ID NO: 1 - DNA, 7001 bp, Artificial Sequence
  chemically treated genomic DNA (Homo sapiens)
tattgttttgttttgttttttagttaataatatattatgagtatatttttattttattaaatatttttttataaagttattttgatggttgtatattattttattttatgaatgtattatattaatttattttttggtgtgggttatttgattttataattttatttttagaataatgaaatatttgtgaagttttagaaaatattggtgtttgggttttaattttatagattttgatttaattggtttgggttatagattaggtattgggaatttaaaaagtttttttagtgattttaatgtgtagttaagatcgggaatttttgtagatagggatgataggaggtgagttatttttagtatttattatttagtattaatattattattttgagttgttaagtgaatgatgtatttgatttattttataaagatatatgtgtaaataaaattattataggatttggtttattagggtttgtgttttaagttttttatgttaagttatatatcgtatattaaatattttaaaatgtattttattgatatatatattaagtgaaaagtgtttttgagttaaataatgatagtataattattaagtaatgataatttgaaatgaatttattattttgtaatttagggataagttatttttttgaattttttgtattttgagagtatttgttatatttgtaagatgaagagtttgaattggttagataatgttttgtgtgtttggtatatgataggtatttaatagttttaaagaattaatgtatttagatgaattgtatattaaatttgttgttttttttttatggttttattaatttaatttgagagaaattaattattttgtaatttagggataagttatgtttttgaatattttgtagtttgaggagaatatttgttatatttgtaaaataaaataagtttgtaagttttttttttttgttttaaagagttttgtgtttttgaatataaaatataaataatcgttatgttgttaattattggtaaatgttttatttttaatttaaggaaatattataaagtaatagatatattaataaaaggttattagttaataggtattgtttgaaaagagtataaaagaattttagtatgattttttatattgtgtttttattattgttaataataaaataattagtaattatgaagtgggtggaattaatttttttaatttttttattaaattttattgaatttagaatattgtatagaaatgaatatggaataggtgagatattttgtgttttttttgttttttttttatattaaaattttttaaattataaaatttgtattaatttgttttgatttattatttatatttattattttatatggagaaaaaatatttaattgatggatatatttaaatgaaagaaaaatttgtaattttataagaggtttataaagttatagtagtgtttaatggatgaatggtttgtatgttttatgttgaattaatttttatattttaatggtatgtatattaattttgaaaaattatatatatatatatatatgtatatatatatgaatataaataaaattttatatgtgaagaagttagaattatgtttttttatataatttttttagattagtaaaatagataaaatttttgtttttaatatagaaaaatgggttattatttgatggtttgaagaagaaatattgtgattgggatatgaatggtaaatcgtagtataattatgtttaaaagaatgtttgaaatatatttttaattatttgatttttaggatagttatagtattatagtatagggaaaaattaaataattggaagataaaatttggattttagtgataggtttattataaattatgtttgttaattttattttttagttttttagtttttttttttttaagtataaaattaagatgtttaggttatttttaatgtttttttaattttgaaattgtatagttttaattgaaatataaatatttatatgtaataatgattatttttttggttgtagttgaaaatacgttttatgaagtttattttgttttttagtttttatattggatttttattaatgtattgtagagataagtttagttgatttgtaagttttgtttatataaatgtattttaaatgtgtaaagtaaggataagtaaatatttaaataaaattgggtatttttgtgagtttttaaaagtataaaagtaatttggataattttaagaaaagttatttatattgaatattaatttgatgttgaagaggttaaattgttgattaatgttttcgatattgattttttgattttttgaaattttatgagttaaattaaattagattttagaaattgaagattagtgtttgattagtgataattatatattaatttaggaattttttttattagtattaatagggtgatattataatgtttttttttttgtatattatttaaattttagtagtaaattataggtgataaaatattttatttgttgttatttgtggagagtatgttagttttttggatgtttttttattttatattttaaaaatttttaataaagaatttaaagtagtgtgttgttgttattttttgtatatttaaatttgtataaggattgttttgagttaatttatgagtattgtagttttgggttttagattttgattatattgggaatagatattgttagaggtttgtttaattattaatttttttttgtttaaatttaaaagtaattataaagaatatagatatttttaattatgggtatattatagtagatggatggttatagaaggagaaattatttttatgggaaatttatttattttagtttttaatatttatatgtatatttatggtaaaagaaaataagaaaaagattaaagtttttttttagatgatttggaagttaattttatataattttataaattaaatgtttaaatagattataatataaatagaaaataaaataaataaatgaaaaattatatttgagaaaaataagtttgttgtaggtttgttttttaaggatttatacgtatttttgttttagggttattatattttttgtttagtttgtttaagaagttatttataaggaagtaagtaaaatggtgaaagatgtattgattgtaattgagaaatttattggagatgaatagtttttagggtgtttagaaaattaggtgagtgaataattttaaaaaagtattgtgatatttgataaaaatttagtatgttgaagagaagatataaaaatagtagtgaaaaatgtatttaaatatttgaagagttattgtatgaaagagggattagatttattttgaattgttaaagagggtagaagagaataataggtagttattataaagagattatataaatatgatgaattaaggttttgaaataagattattttgatgattatgggtatattaatttttttgagttttagtttttttatttgtaaaataagggatgataatagtttttattttatagttagtatggaaattgatataatagtaatagtagttaatttttattatatatataatgtgattggtattattttagggagtataatgtgtatattgataataaaaatattttatgatataggggatagatagtattgatgaattagaatggttgtttagtgagttaagagatgttggttcgggtttttgggtaggatattagttttgtttatttatatttatttattaaatatttaaaataatttttgaagatagatgttaattttttaattgaggaagttgaggtttagagaatttaagtaatttttttatgggaattattaaatggtagagttaggatttgaattagattatttggtttaaaattgatagttttagtagttttattatattataattatagtgaatgtaagatgtatagtatatcgttagggttgttaggtttagtaaataataataaaatataatatttagtttaatttgaattttagataaatattaaatattttttttagtataaggatattttattgtagaagtttaataaataatatttattatttattttattttaatatagaaataaatttgataatgattagaattttttaattataaaataatatgtttagagaatattttgttatggtggggttaattaggtggttgaaagataatgtatttggaatattatagaagagatgtttttttaaggatatagtttaagttttttttaattttgaaatttatgaattgataaaaatttttgttttgtatttttatttttgttttgttttgataatttttttaaaatgtgtataaaaaaataagaatatattatttattgtaattttataattaattagaggtttaaggtaatgttatagatcgttgatttatttttgtaaatttaaaggtatgttttttaaatgaggattgggaattagaaattttacgtaagttttttaggattttttaaatattattgtagtagttataaaagttatataaaagtttttttagatatatgaaatatatgtattttttagatgttttttgtggaatattgatgttgttatttgagtttggtaagggtaagttatagaggaggaaatatatatattttaaaatattttagttaaatatgtaattgtggttaagaaaagtgtttttttaaaaaataattattttattttaaaattatttttatttataattgaaaataatatgtagttttttattgttttgtaaggatggtatgtaaaatgagtatttatgtttgaaatgtggtatgtttgtgtgtgtgtgtgtatatgtatatatgtatgtatatattataatatatatatatgtatttgtaattttaaaagttatatttttaatgagaattatgaaaatattattttgtttagtttttttttttatttaaatttaaatttaaagttttggtgtatacgggtaggatgagtaggtttgttatataggtaaatacgtggtatggtggtttgttgtatttattaatttgttgtttgggtattaagtttagcgtgtattatttattttttttaatgttttttttttttgtattttattttttgataggttttagtgtgtgttgtttttttttttgtgtttatgaaatatggtttatatatttataaaagtttatatattttagtttaaatttttgataatataaaaaggaaaaataaaataatttaaaattgggaaagagaaataaaagattgtatggtttttttttttttattgtttggatattaaagttttattttttataaggtagtaaagaaatttattttattaggttgaaataaaatatattagaatttgtatggaaaattttttagaatttatagttttgattttagatattagaaaatgttttatgtgttttatagatttttaaagtaaagttagttgtttttttttaaatataaaatattttttatagttatttgtttttttggaagaattttgttatgagaaagaaattttggagaagtacggatatttagattgttgtagttaaagtgaagagggaagatataattgtttttttgtatataaaaagtttattttagtatcgattttatttttttaagttttagaatttgttataagttgtgaagtatatgaagaagatagggagatatttatgaataagtaaggatttagtttaaaggtagatgtaaattttagaaatatagtaatggtaagtttaatttagtatttttgtaatgtatttatgtatttttagtaagaggtataatgtttttttggtgttgtgtttgttgaggttttaggtaaggtaattaggagagtaatatttaatgtaatttggtttttatagtacgttagatgtagtataaattataggataaatttattagaggttttattagttttttgagagatatatattttttttttttttttttatttattttatttttaattttattttgtttaagaatatattagtattgtattaaattgatgttttttagagttatatattggtgttttgtgtttatttaattgtttagaaataaaagttagagatttaagtatggttaagtatggttaagatatatagatatggtaaaggtttattgaatatttaggatgttgtggggtcgggcgcggtggtttacgtttgtaattttagtattttgggaggtcgaggcgggcggattacgaggttaggagatcgagattattttggttaatatggtgaaatttcgtttttattaaaaatataaaaaaaattagtcgggcgtgatggtgggcgtttgtagttttagttattcgggaggttgaggtaggagaatggcgtgaattttggaggcggagtttgtagtgagtcgagattgcgttattgtattttcgtttgggttatagagcgagatttcgttttaaaaaaaaaaaaaaaaaaaaaggatgttgtggaaatatgtttgtttgtatagaggattagattaatatttataaataaattttgaagttttttttttttttttttttttatttttttttttttttttattttgttgataggaaattgaaggttggaaggttaaaataattggttaagggtatatagttagtatatttgattttaggtttttttgttggagaagtttgtacgtaattttttaattatttttgttttttatgttattttttaaattagataaatagagagattgtttttagaatatttttgttatggcgattatttaggtgtataattttattttgtattgataagggataaaatgtttatttttttgttgtatttagtagaagtttggttttgttgatttttgaaatatatttgagtaggtttattgaaaaagattttttaataagaattatggttagtatgtttgtttattttttttttataatagaatttggtattatttgttagata

SEQ ID NO: 2 - DNA, 7001 bp, Artificial Sequence
  chemically treated genomic DNA (Homo sapiens)
tatttgatagatggtattagattttattatgagaagaaaataggtagatatgttaattatgatttttattaaaaggttttttttaataagtttatttagatatgttttagggattagtaaagttagatttttgttaagtgtaatagaaagatggatattttattttttgttagtgtagaatggggttatgtatttggatagtcgttatagtagagatgttttaagggtaatttttttatttatttggtttaggaagtaatatggaaggtagaagtgattgaagagttacgtataggtttttttaatagaagaatttggggttaaatgtattagttgtgtgtttttagttagttgttttagttttttaatttttaattttttattaataaaatgggggaaagaagaagaatgaagaggaagaggagaaggaggttttaaagtttgtttgtgagtgttaatttgattttttgtgtaagtagatatgtttttataatattttttttttttttttttttttttgagacggagtttcgttttgtggtttaggcgggagtgtagtggcgtaatttcggtttattgtaagtttcgtttttagggtttacgttatttttttgttttagtttttcgagtagttgggattataggcgtttattattacgttcggttaattttttttgtatttttagtagagacggggttttattatgttagttaggatggtttcgattttttgatttcgtgattcgttcgtttcggttttttaaagtgttgggattataagcgtgagttatcgcgttcggttttataatattttaagtgtttagtaaatttttgttatgtttgtgtattttgattatgtttgattatgtttggatttttaatttttatttttaggtaattaggtgaatataaaatattaatatatggttttggaaagtattaatttggtgtaatattaatatatttttgaataaggtaaaattgagagtagaatgggtaaaaagaaaaaaaaaaggtgtatattttttaagggattaatggaatttttggtaggtttgttttgtggtttgtattatatttagcgtgttatggaaattaagttatattgaatgttgtttttttaattattttgtttgggattttagtagatataatattaaagaaatattatattttttattgggagtatatgagtatattgtaaaaatattaaattaggtttgttattgttgtgtttttgaggtttgtatttatttttaaattggatttttatttgtttatgaatgtttttttgttttttttatatgttttatagtttgtgataggttttggaatttggaaaagtgggatcgatgttggagtgggttttttgtgtgtaagaaaatagttatgttttttttttttattttggttgtagtagtttgaatgttcgtatttttttaaaattttttttttatggtaaagtttttttagaaaggtaggtagttataagaaatattttatgtttggagaaagataattaattttgttttaaaaatttataagatatatgaaatattttttaatgtttaaaattagaattatagattttgaaaaattttttatataaattttaatgtattttgttttagtttgatgaaatagatttttttgttgttttatggaaaatgagattttaatgtttaaataataaaaggaaaaaagttatgtaattttttgttttttttttttaattttgaattattttattttttttttttgtgttattaaaaatttggattaggatatataaatttttataaatatataaattatgttttatggatatagggagggaaatagtatatattggggtttgttagggagtggagtgtagggagggagagtattaggaaaaataggtaatgtacgttgggtttaatatttaggtaataggttggtaggtgtagtaaattattatgttacgtgtttatttatgtaatagatttgtttattttgttcgtgtatattagaattttaaatttaaatttaaataaaaaaagaaattgagtaaaataatatttttatgatttttattaaagatgtaatttttggaattgtaaatatatatgtatatattatggtatatatatatatatatatatatatatatatatatatagatatattatattttagatataaatgtttattttatatgttatttttataagataataaaaaattgtatattatttttaattataaataaaaatgattttgaaatgaaataattattttttaaaaaaatattttttttggttataattatatatttagttaaaatgttttaaaatgtatgtgtttttttttttgtgatttatttttattaaatttagatgatagtattaatattttatagaaagtatttgaggaatatatgtgttttatgtatttgagggaatttttatgtagtttttatagttgttatagtaatatttagagaattttggaaggtttacgtaagatttttaatttttaatttttatttaaaagatatatttttgaatttataagaataaattagcgatttgtaatattattttgaatttttaattggttgtaaagttgtaatagataatgtatttttgtttttttatatatattttgaaaagattattagaataagataaaaatagagatgtaaaatagaaatttttgttaatttataaattttaaagttggaaagaatttaaattatatttttaaaggagtattttttttatgatattttaggtatattgttttttagttatttaattaattttattataatagagtattttttgggtatgttgttttataattggagagttttaattattattaagtttgtttttatgttgagataaaataaataataaatattatttgttgagtttttataatgaaatatttttatattaagaaaagtatttagtgtttatttaaaatttagattgaattgggtattatgttttgttgttgtttgttaaatttggtaattttaacgatgtgttatgtattttatatttattatagttatagtgtaatgaagttattaagattgttaattttaagttagatggtttagtttaaattttggttttgttatttggtggtttttataagaaagttatttaaattttttgagttttagtttttttagttggaagattagtatttatttttaaggattattttaaatgtttaataaataaatataggtaagtaaagttgatattttgtttagaagttcgagttagtattttttgatttattggataattattttgatttattagtgttatttattttttatgttataaaatatttttattattaatatatatattatgttttttagaataatgttagttatattgtgtgtataataaaagttagttattattgttgttatattaatttttatgttaattatgaaatgggagttattattattttttattttatagataagaaaattgaagtttaaaaaagttaatatgtttatagttattaagataattttattttagaattttagtttattatatttatatggtttttttataataattatttattgtttttttttgttttttttagtaatttagaatgaatttaattttttttttatataatagttttttaaatatttaaatgtattttttattgttatttttgtattttttttttagtatgttaaatttttgttaaatattataatgtttttttaaaattatttatttatttggttttttaaatattttgaagattgtttatttttagtgggttttttaattgtagttaatgtattttttattattttgtttatttttttgtaagtggttttttgaataaattgggtaaaaaatatggtagttttgaaataaaaatacgtgtgaatttttaaggaatagatttgtagtaagtttattttttttaagtatagttttttatttgtttgttttgttttttatttatgttgtaatttgtttagatatttgatttgtaaaattatgtaaaattagtttttaggttatttgagaagaaattttagttttttttttgtttttttttgttataaatatatatatagatgttaaaggttaaaataagtggattttttataagagtggtttttttttttgtgattatttatttattgtaatgtatttataattgagggtatttatattttttatggttatttttaaatttaagtaaaaaaaaattggtaattagatagatttttaatagtgtttatttttagtatgattaaggtttaaaatttaagattatagtgtttatggattgatttaaagtaatttttatgtaggtttggatgtgtaaggagtaatagtaatatattattttaaattttttgttagaaatttttaaaatgtggaatggaaagatatttaagagattaatatattttttataaataatagtaaatagaatattttattatttatggtttgttgttaagatttaaatagtatatagaaaagaaaatattataatattattttgttggtattgatgagaaaaatttttgaattagtatatggttgttattgattagatattaatttttagtttttaaaatttgatttggtttgatttatgagattttaaggaattaaaaggttaatgtcgaagatattagttaatagtttaatttttttaatattaagttgatatttagtatgagtaattttttttgaaattgtttaaattgtttttgtgtttttaagagtttataggggtatttaattttatttaagtatttatttatttttgttttatatatttaaagtatatttatataagtaaaatttataggttagttaaatttatttttgtagtatattggtaagaatttaatatggaagttggaaggtaaaataaattttatgaaacgtgtttttaattgtaattaagaaagtaattattgttatatatgaatgtttgtgttttagttagaattgtatagttttagaattaaaagaatattagggataatttaagtattttaattttatatttgaggaaaagaaaattaggaaattaaggaatgaagttaataagtataatttatagtagatttattattaaaatttagattttgttttttagttgtttggtttttttttgtattgtagtgttgtaattgttttgaaagttaaatggttaaaaatatattttaggtatttttttgaatatagttgtattacggtttgttatttatattttagttataatattttttttttagattattaaataatgatttatttttttgtattaaaaataaagattttatttattttattagtttgagggagttatgtgaaggagtataattttggtttttttatatataaaattttatttatatttatatatatgtatatatatgtgtatatatataattttttaaagttaatatgtatattattgaagtgtaaaaattaatttaatatgaaatatataaattatttatttattaaatattgttataattttgtaaattttttgtaaagttataagttttttttttatttaaatatatttattagttaaatattttttttttatgtggaataataaatatgaataataaattaagataaattaatgtaaattttataatttaaaaaattttgatatagagaaaagataagaaaaatataaaatattttatttattttatatttatttttatgtagtgttttggatttagtaaaatttagtaggaaaattaaaaaaattgattttatttattttatggttgttagttattttgttattggtagtggtggaagtataatatggaaaattatgttgaaatttttttatattttttttaggtaatgtttgttaattagtaattttttgttggtatatttgttattttatggtatttttttaggttgaaaatgggatatttgttaataattaatagtatagcggttatttgtattttatgtttaaggatatagagttttttggggtagaaaaaaaaaatttgtaaatttattttattttgtaaatataataaatattttttttaaattatagaatatttaaagatatgatttgtttttaagttgtagaataattaattttttttaaattaagttaatgaagttataaagaaaagatagtagatttggtatgtaatttatttaaatatattaattttttaaaattattaaatgtttattatatgttaggtatataagatattgtttgattaatttagattttttattttgtaaatataataaatatttttaaagtataaaaaatttagagagatgatttgtttttaagttgtagaataataaatttattttaaattattattgtttgataattatgttgttattgtttagtttagaaatattttttatttaatatgtatgttaataaggtatattttaaagtatttagtatgcgatgtatggtttaatatagaaaatttagagtataagttttaataaattaagttttataataattttatttgtatatgtgtttttataaagtgggttaggtgtattatttatttagtaatttaagatgatgatgttaatattaaatgatggatgttaagagtggtttattttttattatttttgtttataagggttttcgattttggttatatattagaattattgggggaattttttgaatttttaatgtttagtttgtaatttagattagttaaattagaatttgtggagttgagatttaggtattagtattttttaaagttttataggtgttttattattttaaaggtaagattataaaattaaataatttatattaggaaataaattaatatggtatatttataaagtagggtgatatatagttattaaaataattttgtggaagaatatttaatgaaatggaaatatgtttataatatattgttaattgaaaaataggataaaataata

SEQ ID NO: 3 - DNA, 3953 bp, Artificial Sequence
  chemically treated genomic DNA (Homo sapiens)
agtaggagggtaggagagaattttgtatagttggttacggtgttttatttaagggtttaatttggggttttattataaaagttgtagtaaaattgttaaaaataggaattattgggggtgggggttttgttttttttgtttagttattattttttttttttaatttttattttggtttatattacgtgtttttagaagaaacgttttgagtaggggttggtatgagattgtttttttttttaggatttatttttttttatgattaggttggtgattttttttttagggtgttagtgttatttattgagtagatgtttggtaggtgtttgttatgtgttagatttagtaggggatagagttttttcgatatagatggattagtatgtttggatataaattgtgaaaggagttgttaatttttttgtgtaaaatttatttttgcggttatcgttaatatttttatatatgttagggtatttagggttaggatttggtaattttgtttaggagtagtcgttttggagatttttaagacgagggaaagaaatgggtggaaataggggtttatattgtgggtttcgtagttattaaatagtttaattcgtggttattgagtgttttgaataatgtttggttggattttgagtttgagtgtgttattaatttagtttgttattgtcgttgttgttgttatgtatttttttattagttttgtttagaaagattttttttttttttaaaatattagtaaagggggtttagattagtttaagttaaatattttgtaataaaatggagtagttattttggtgaataagtatatttagaaaaggaaattgtttgtttggtaagatgttgtttaatagtattttttattttgatgtttcgtagtttttgagttaggaaattgagaagtttttgattagattgtaaaggttgtaggtttcgtaagggtgtaaggttatttttaaagaattagaagttaggtttttcgatttttatttttgttagcgttaaatagtaatcgttgaaggatgtagggtagttgtgagttgtagtttttttataggtaaaaattataagggtaaaatttggtttttagttttatagggatattttaagttgtgaaagtgttttggttataaagaattgcgtaaatgttaaatattaggtttagttataataattattttagtaataaattaaagagaagggtgaaatattggtaagtattttggagtttaattagtaagtttttgagatttttttatgtgttgattgggataaattttattttttaaaagaaaagacgtttttttggttcgagatatttgtgagttgttttagtaggggattagttatttttttattttttaaagttatagatagttgggatggttaagtaggtagtttaggttgatggtttattaaggttatttttttgtttatatagttttatagatatttggggttattttagttttagaaaagatgttttatattttagtaattgtaagttaaggataagtagagagatgtgggattgttgtttttatgtttgttgtagaagttgaggttttagatttgataaagtaagtgtagtgggaataagggaatatattattagaaattgggattttagaaaatagaatagttattgtttattaagtgttaggtatttttttaatagttttgtatatatgtttaaagtttatgtttaaaacgatataaatttattattttatagttatggaggatagaagtttaaaatgggttatattgggttaaaattatggtggtagtagagttgtgtttttggaggttgtagggaaaaatattttgttttttttagtttttagggaagggttgtttatgttttttagtttatggtttttttttagtagttacgagtttgatttttattgttatttttatatttttttttttgattttgaggttattgttttttttttgtataattaaggatttttgtgatgataatgggtttatttggagaatttaggttaattattttatttttaggtttttaattatattagtaaaatttttttttgttatggaaggtagtaaagttataggttttagggatgaggttgtggatatttttggggagcgttattttgtttgttatatagtaatttttgttataatttagggcgatggtatattttattattatttttaattagaaattgatgtgtggggaggtgatgtattataatttatttagggttaggtagttggatttgaatttgtttgatttttagatttgaggttttttggttttagaattttttttgaagtgaaaggtatgaggtcgattattttttgatttggtaaatagagatgttagtttggtttttagtgttagggagttttttggagtgatggtatagggtatatttttgttttgtattttaagtttagagattgggttttaggtttagttttttttttaattttttgagagatgatagtttttgggtaaagtttttttgtgttttttagtttttttatttgtgagatggtggtatggggagaggttggagtgatgttatagttttttttagtttgtattataggttttaggatttaggttttattagtaatttgttgggggaggtttgggttttttaggagaaatttgataagatggtgttgtaaatattaacggatatatagtattttatatttataggttgttttaggggtttttaataattttgattatttttgttttattttgtagatagaaaatcgaggtttagagagattatataatttgtttacgatttttttttagtaagatggaggttaagtgaaatgagaaagtaggttttttgttattttttttgtttagaggttttttttttatattagggttttttaagggttgagatttagttatatttgtgcgtgattaaatataagtgtgaataatgtaaagggagacgtttttaatttaaggggttttaattttgtaatgtaattttgagattatgtttttttttgttaaagttttttttttttgaagtgatggttattgtagatggtgagggttttttggaggcggataatatttttatatgataaaattaaaagttggtagtttcgaattgatttttggagtgttttgaaatgtaagaggttttcgaaattttagtttgggagttacggagggtttttttttttttttaggtttattagtttgggaggtttggagagaggtttggaggatttgttggggattaaagaagagtattggtgggaggatagggcgggggaagggggaggggagtgaagtagtttttttggaatgttggtggtgggggaggtagtttttttggtggaggagttttagcgttttttttttttttttttttgttaatataatggataatggtaattgtttatatatttttatggaggggaaggggatgagtgtagggaatttcgattttattcgggagatttgtaagtttgtagatatttttttttcgtttttattgaatttttgatttttgttttgtagttttcgtagtttgttgtttgtttattttatttgtttagttttagggatagagttgatttttgaatttttaagttttatattgttaggattagtgagtagtaatagggtcggggttgggtttattagttttttagtttagattttggttgtagatataaataggttttgtaagagttggttgtttagagattgcgagaaggaggtgcgttttgttgtttgtttcggttattttggttttttagtttaaggtttaggttttgttttaggtcgggtttttgggtatttgaggttttttttcgttttgtgtttttttttttatttggttgtaatgagtgggggagtacggggtttttgtatgttgaaggtattttatttagttaggtttttttttttttttagg

SEQ ID NO: 4 - DNA, 3953 bp, Artificial Sequence
  chemically treated genomic DNA (Homo sapiens)
tttggaggagaagaagggtttggttgagtggggtgtttttagtatgtagaagtttcgtgtttttttatttattgtagttaggtgaggagaagggtatagagcgggagaagattttaggtatttagaggttcggtttggggtaaggtttgaattttgagttggggagttagagtgatcggggtaggtagtaggacgtatttttttttcgtagtttttaagtagttagtttttgtagggtttatttatgtttgtagttagggtttgggttgggaggttgataagtttagtttcggttttgttgttgtttattggttttggtaatgtggaatttaagagtttaaggattagttttgtttttggggttgggtaaatagagtgggtaaatagtaagttgcgggggttgtagggtaggggttaagggtttagtgggggcgggaggggagtgtttgtaggtttgtaggtttttcgggtggggtcggggttttttgtatttattttttttttttttatgggagtgtgtgggtagttgttattgtttattgtgttggtagaggaggggaggggagggacgttgggatttttttattaaggagattgttttttttattattagtattttagggagattattttattttttttttttttttttcgttttgtttttttattagtgtttttttttagtttttagtaggttttttaggtttttttttaagttttttaaattggtaaatttggggagaggggagagtttttcgtggtttttagattgaggtttcggagattttttgtattttaaaatattttagagattaattcggagttgttaatttttaattttgttatgtaaagatattgttcgtttttaaaaaatttttattatttatagtgattattattttaaaaaggaaaggttttaataaaaaagggtataattttagaattatattatagaattgaagttttttagattgaagacgtttttttttgtattgtttatatttatatttgattacgtataggtgtgattggattttagtttttgggaagttttggtgtggggagaagatttttgggtaaaggaagtggtaggagatttgtttttttattttatttggtttttattttgttggaggaagatcgtgggtaagttatataatttttttgagtttcggttttttatttgtaaaatggggtaagaatggttagggttgttggaggtttttgagatagtttgtgaatgtaaagtgttgtgtgttcgttggtgtttgtagtattattttgttaggttttttttggaaggtttagattttttttagtaggttattgataggatttgagttttagagtttgtgatgtaggttgagaggaattgtgatattattttagtttttttttatgttattattttatagatgaagagattgaagagtatagagggattttgtttagaggttgttattttttagggagttagaagaaaggttggatttagaatttagtttttggatttgggatgtagggtagaaatgtattttgtattattattttaggaaattttttaatattagaaattaggttgatatttttgtttattagattagggagtggtcggttttatgttttttattttagagaagattttggagttagaaaattttaaatttaagggttaggtaggtttaaatttagttgtttgattttggatgagttatgatatattatttttttatatattagtttttgattgaagataatgatagaatatgttatcgttttgagttatggtaggggttattgtgtggtaagtagaataacgttttttaaagatgtttatagttttatttttggaatttgtggttttgttattttttatggtaaaaaaagattttgttagtgtgattaaggatttggagatggggtggttggtttggattttttaggtgggtttattgttattataggggtttttaattatataagagggaggtagtggttttagagttagagaaagagatgtgaggatggtagtggagattagattcgtgattgttggaagggggttatgagttgagggatatgagtaatttttttttagaagttggagaaggtaaagtatttttttttgtagtttttaggagtatagttttgttgttattatgattttagtttagtatgatttattttggatttttgttttttataattgtaagataataaatttgtatcgttttaagtatgaattttgaatatatatgtaaaattgttagaaaggtatttagtatttagtaaatagtaattattttgttttttagaattttagtttttggtaatgtatttttttatttttattatatttgttttattagatttgagattttagtttttgtagtaggtatgaaggtagtagttttatatttttttgtttgtttttgatttgtagttgttgagatatggaatattttttttaggattgaagtggttttagatgtttatgggattgtgtagatagggaggtggttttggtgagttattagtttgggttgtttatttgattattttagttgtttgtagttttagaaagtgggaaggtggttggttttttgttgggatagtttataggtgtttcgggttaagagagcgtttttttttttggggggtagagtttgttttagttagtatatgggggaattttagaagtttattggttggattttaagatatttgttagtgttttatttttttttttggtttgttattaaaatgattgttatggttaaatttagtatttaatatttgcgtagttttttgtggttaaagtatttttataatttagaatatttttataaggttggaggttagattttatttttgtgatttttgtttgtgggaaaattgtagtttatagttgttttgtattttttagcggttattatttagcgttggtaggggtgggaatcgggaggtttggtttttagttttttgagggtggttttgtatttttgcggagtttgtagtttttgtagtttgattagggattttttagttttttggtttagggattgcgaggtattaggatagggggtgttgttgaatagtattttattaagtaggtagtttttttttttaaatatatttatttattagggtggttattttattttattgtaaggtatttggtttaaattagtttaagttttttttattaatattttggaaaggaaggaggtttttttggatagagttgatggaaaaatatataataataataacgataataataaattgggttgatgatatatttagatttagggtttagttaggtattgtttaaggtatttagtggttacgggttggattgtttggtggttgcggggtttatagtgtaggtttttgtttttatttatttttttttttcgttttgggagtttttagagcgattgtttttgaatagggttattaagttttggttttggatgttttgatatgtgtaggagtgttggcggtgatcgtaagagtggattttgtatagaaagattagtaattttttttataatttatgtttaaatatattggtttatttgtatcgggaggattttgttttttgttaggtttggtatataatagatatttgttaaatatttgtttagtgaatggtattggtattttagagggagggttattagtttggttatagggaggagtgggttttgggaggggaggtagttttatattagtttttgtttagaacgttttttttgggagtacgtggtatgagttagaatgagagttagggaggggaggtggtgattgagtaggggagataggatttttatttttagtagtttttatttttggtaattttgttgtagtttttgtgatagagttttaagttagatttttgggtggggtatcgtagttagttatgtaagatttttttttgtttttttgtt

SEQ ID NO: 5 - DNA, 7432 bp, Artificial Sequence
  chemically treated genomic DNA (Homo sapiens)
atttgaagttagagttatttagaggagaaagagttggaattgagaatttaaggaatgtttggaagtgatcgggttcgagtttatttaggaagaaatagaggttggagatatgagattgtgttgttatttttttttattaatttttgggttttattgaggttttattataagtttggttttgtagtttagtgattaggagaaattagatataagataataataatagtaatgattttttttttttttttgagacggagttttgttttttcgtttaggttggattgtagtggcgcgatttcggtttaatgtaagttttattttttaggtttacgttatttttttgttttagtttttcgagtagttaggattataggcgtttgttattacgtttggttaattttttatatttttagtagagatggggttttatcgtgttagttaagatggttttaattttttgatttcgtgattcgtttgtttcggttttttaaagtgttggggttataggtatgagttatcgcgtttggttaatagtaatgatttttgagtatttatattgttagtttttacggtaagagttttttttattttttgttttgttttgttttaagatagagttttgttttgttatttaggttggagtgtagtggtgtgatcgcggtttattgtagtttttatttttcgggtttaagttatttttttgttttagttttttaagtagttgggattataggtacgtattattatttttggttaatttttgtatttttagtagggatagggttttttattatgttggttaggttggttttaaatttttggttttatatgatttgtttatttcggttttttaaagtgttgggattataggcgtgagttattgcgtttttttttgtatttgtttaagtaatatattgaaatatgtattgtgttttttattttatggaggaggaaattgaggttagtaaatgaggttgttatgggaggtggagataggatttgaatttgttttagtgtaggaggtttaagagtttttgtttttttttagggtattgtgtgggagggtgagaaggagggaggtttatagaggtatgatttttgattgttattgttatttgggttttgttttttgaagtttttgttaagcggggaggtggtcgggggagggttttgttttgtgtagttttttttttttcggttcgtagagttgagtatagagggatagaggtacggaatttttagaaatgtttttttttagaaataggttttaggttttgtttgttttgtgtttttgcgtgttggttttggtttgtattgggggtgagaagaagtgggtggagggatgtggggtttatatttggtgggtgtgagtgtggttgtgtgttttgtggttttgtagttacgtgagatatgagtacggagtgtgtgcgttttatggcgtgcgtatgtatgtgcgtgtcggggagtgtgtgtgtcggtggttgagagtgaagtgtgaatgttatattggtataaattgggattatttgtgtgtgtgtacgtgcgtgcgtggaagtgggagtatgtagtcgtggtaaaaaagtgtatgtttgtgtgtatatgtgtatttgtgtgtatttgtttttttgtggggtatgtgtgtgtaaaatatttgagtgtgtggatatgtgtgagggggtgagtgtgtgttggtgtgtacgtttgtgttttgtatatgtatttttttttttttttttgagacggagttttattttgttatttaggttggagtgtagtggtagtagtggtgcgattttggtttattgtattattcgtttattcgttttaagggatttttttgttttagtttttagagtatttgggattatagatatacgttattatgtttggttattttttttttttgagacggagtttcgttttgttatttaggttggagtgtagtggcgtgattttggtttattgtaacgttcgtttttcgggtttacgttatttttttgttttagtttttcgagtagttgggattataggagtttattattacgtttggttaattttttgtatttttattagagacggggtttcgtcgtgttagttaggatggtttttatattttgatttcgtgattcgtttgtttcggttttttaaagtgttaggattataggcgtgagttattgcgtttggttaatgtttggttaatttttttatatttttggtagagatagggttttgttatgttgtttaggttggttttgaaattttgattttaggtgattcgttcgttttggttttttaaagtgttgggattataggtatgagttattacgttcggttatgtattttatgttaaaatgggattatattttagattagtattatttagtagaaatttaaatttttaatatagggttaggtacggtggtttatgtttgtaattttagtattttcggaggtcgaggcgggtggatcgtaaggttaggagatttgagattattttggttaatagatgggtaaaaatttatttttattaaaaatataaaaaattagttatgtatggtggtatgcgtttgtagttttagttattcgggaggttgaggtcggagaattatttgaattcgggaggtagaggttgtagtgagtcgagatcgcgttattgtattttaatttgggtgatagagcgagatttcgtttgaaaaaaaaaaaaaatttaatacgtatgtagataatgtgtaaggtattattttatgtgtatcgtatgtagtaatttttaatttttacgataattttgaggtagatattattatttcgttttataaaaggagaaatagttttggggagataggataagttatcggttaaggtatatagttagttatatgtggttttcgcgtgacggttggtttttgtaggcgaggttttgtttagatgcgtgggtagaaggtttggttcggaaagaggaattgatagtaaggttaagttaatgtttgtttttgggggtagaaagttattttttgttttttttttattgtttatagaggtagtttagatagggtgggggttataggagaacgaagggagaagggggtagtttttgggtagtaaaattaggtggtgaagggaggtattagaggatggtaattagagaggttattagaggggaattataggtagatagggtgataggagggattattgatataaggtgaagagatggtttagtcggacggggtggtttatatttgtaattttagtattttgggagttcgaggtgggtggattatttgaggttaggagttcgaggttttaatatggtaaaattttattttttttaaaaatataaaaattagtcgggtatgatggtagatgtttgtaatttttgttattcgggaggttgaggtaggaaaattgtttgaatttaggaggtggaggttgtaatgagacgagattatgatattgtattttattttgggtaatagagtaagagattgattttgttttataaaaaaaaagaaaaaagaaaaaaaaaaagagatggttgatggttaaagaggggttagcggttaggggatatataagggtaaaggtaggaggtaagaggattggtagggggttgtttttgggttatcgggagcgatataggatgagtatggagggaaagggagaaggggattttagggttttagtttatttaagttgttttttggttttatttagtatgttagttagaggtttaggaaggaattttgagttttttattaaagttaaagatgagtcgttggagtttggtgaggggtaggatgaaggagttgttggagatagtggtgaataggattagagacgggtggtaatggttttggtgagggtgtgttgggttgggtggtgggaggggatttttgggtttgagggaggaggggttggggtttggatttttgagttttagggaggaggaaagggtgggagtggggttgtgatttttaggtttgggaggagtggagggttagagttgagagtaggaatttttaggttatagagaggagcggataaatggggtagagaatatttggggagagttggggtttttattgtgatgtttttttttttgtaggagttcgagtatttttcggggttttatgtagatttattatgacgattatttgagggatttgggttcgtttattaaggtttggtttttcgaatttaaagatagttttttgaagaagatttatagtttgtgttttaggtttgtttgtggggataaggattagggttaaaatgtttataaaagttaggtgtggttgtggcgggtgtttgtagttttagttatttaggaggttgaggtaggatgatggtttgagtttaggagttcgagattagtttgggtaatatagcgagattttttgggggtaaaataaaaagaaaaaaaaaagtttatatttttttaataaataaagttttatttgtgtttttgtttggatttttttttagtgtggttagaaaaaaatttattttattgttttttaggaattaatgagtagaagaggtgatatttgatggggaaggaagagtagggaggtcgggaagggtattaaggaataatattttattgtgggtttgcggagaatgggggattttaaggcgtgttagttttaggagggtgagggtaggagcgtgggtggagttagtaggtttttatgatggtttttattgagagtttcgtttttgttttttataagttttgattttatttttagtgggtatttagtatttttaatttttttatagtttttaatttagtttttgtcggaggcgaatttttagagtgagggttttttgttatttgagagaaggttttttgtgacgtgattttgggggacgttattgttttttttgtttttatttatttttttcgtagttttgttggttaggattttggtttagataaaggatgggggttgtggttgtggagcggaagtgggttttaattattataaattttttttgtgttcgttcggagttggtgaggatagtttgttagagtttggtaagaaagggatttagggtgcggggataggggggcgttagtagggagagggtaaagatcgataaagtaggaattttaagaggtataatattagaagttcgtgttggaattatgattgtgtgtgtgtgtgtgtgtgtgtgtgtgtgtgtgtgtgtgtgtgagagagagagagagggagatggagtttcgttatgtagtttaggttagatttaaatttttgggtttaagtaatttttttgttttagtttttttagtagttgggattataggtgtattattatattttataaattatagaatttagaattgtagattatttgagtttttgtttagagttagggtggttgaggtggggaggattttttgagtttaggagtttgaggatgtagtgagttgtgattttgttatcgtgttttagtttgggtgatagagaaattttatttttaaaaaagagaaagaaaaagggataggtataatggtttatgtttgtaattttagtattttgggaggtcgaggcgggtggattatttgaggttaggagttcgatattagttttattagtatggtgaaatcgtatttatattaaaaatataaaaattggtcgggtgtggtagtatatgtttgtaattttagttattttagaggttgagataggagaattgtttgaatttaggaagcggaggttgtagtgagtttagatcgtgttattgtattttagtttgggtgatagagtaagatttagttttggcggaaaaaaagaatgaaaaaatttaaaaaattaaaaaagaattgtaggttgggcgtggtggtttatatttgtaatttaaacgttttgggaggttaaggtaaacggattatttgatgttaggagttggagattagtttggttaatatggtgaaatttcgtttttattaaaaatataaaaattagataggtatggtggtgtatgtttgtatttttagttatttaggaggttgaggtaggagaatcgttcgaattcggaagatagaggttgcggtgagttaaaattgcgttatcgtattttagtttgggcgagagaataagattttgttttggaaaaaaaaaaagaattgtagattatttgtttgtgtttttttttcggggattagattttattttttttttgtcgtatttttttattttttacgtgtggatgatgatattgtgttttgtgtatgtttttcgttattaaaagtgttttttttatagagtaggtgagaatttagtgaggagatgtagggatatgaggtttgatttagggtagagttttaaggtaatatatttgatttattgtaggtttttaatggtgtttgtagagtatttttttgtattgatttagttttagtaaagggtagaggttttgttgtgttttttgttgggtttagaattgtttaggtgtttaagaaagttttttaggttgggtttagtggtttatatttgtatttttagtattttggggaggtcgagatgggaggatcgtttgagtttaggagttttagattagtttgggtaataaaataagttttttatttttataaaagaataaaaattagtagttgggtatggtggtttatgtttgtaattttagtattttgggaggttaaggtaggtaaattatttgaggttaggagtttaagattagtttggttaatatggtgaaattttatttttattaaaaatataaaaattaggtggggtatagtggtttaagtttgtaattttagtattttgggaggttaaggtgggcggattacgaggttagaagttcgagattagtttggttagtatggtgaaattttatttttattaaaaatataaaatattagtcgggtatggtggtaggtgtttgtgattttagttttttgggaggttgaggtagaagaattgttagaattttggaggtagaggttgtagtgagtcgagaatacgttattgtattttagtttgggtgatagagcgagattttattttaaaaaatacgaaaataaaaattagtcgggtggtggcgggtgtttgtaattttagttattggggaggttgaggtaggagaattgtttgaatttgggaggtgggggttgtagtgagttaagattgtattattgtattttagtttgggtaatagagtgagattttattttaaaaaagaaaaaaataataattaaaatgttaaaattaggagtagaattatagaatgttggaaagtgaggtttaagaagggggttgtgtttaagtttatgtatgggaaatttgattgggatatcgagtttatatagagtaggattttagttttttttattagagtggggcgtgattataggaatagtcgtttttagttagtttgttatatgatatttttttaatgttttagg

SEQ ID NO: 6 - DNA, 7432 bp, Artificial Sequence
  chemically treated genomic DNA (Homo sapiens)
tttggaatattgagggggtgttatgtggtaggttgattggaggcggttgtttttgtggttacgttttattttggtgggggggattgagattttgttttgtgtgagttcggtgttttagttaagttttttatgtatggatttggatatagttttttttttgggttttattttttaatattttgtgattttatttttgattttaatattttaattattattttttttttttttgagatggaattttattttgttgtttaggttggagtgtagtggtgtaattttggtttattgtaatttttattttttaggtttaagtaatttttttgttttagtttttttagtagttgggattataggtattcgttattattcggttgatttttgttttcgtattttttgagatggagtttcgttttgttatttaggttggagtgtagtggcgtgttttcggtttattgtaatttttgtttttagggttttagtaatttttttgttttagttttttaaggagttggaattataagtatttgttattatgttcggttaatattttgtatttttagtagagatggggttttattatgttggttaggttggtttcgaatttttgatttcgtgattcgtttattttggttttttaaagtgttaggattataggtttgagttattgtgttttatttgatttttgtatttttagtagagatggggttttattatgttggttaggttggttttgaatttttaattttaagtgatttgtttgttttggttttttaaagtgttggaattataggtatgagttattatgtttagttgttaatttttatttttttgtagagatgggagatttgttttgttgtttaggttggtttggaatttttgggtttaagcgatttttttatttcggtttttttagggtgttgggagtataggtgtgagttattgagtttagtttagaaggtttttttgagtatttaaatagttttgggtttagtagggaatatagtaaagtttttgttttttgttaaggttgagttagtgtagggaggtgttttgtagatattattaaggatttatagtagattaaatgtgttattttagggttttgttttaagttagattttatgtttttgtatttttttattgagtttttatttgttttatgagagaggtatttttggtgacgaagaatatgtatagggtataatattattatttatacgtaggagatgaggaagtacggtagaaagagggtgagatttgattttcggagaaagaatataagtaaatggtttataattttttttttttttttaagataaggttttgttttttcgtttaggttggagtgcgatggcgtaattttggtttatcgtaatttttgtttttcgggttcgagcgatttttttgttttagttttttgagtaattggaaatataagtatgtattattatgtttgtttaatttttgtatttttagtagagacggggttttattatgttggttaggttggtttttaatttttgatattaagtgattcgtttgttttggttttttaaagcgtttggattataagtgtaagttattacgtttagtttatagtttttttttagttttttaaatttttttatttttttttttcgttaagattgagttttgttttgttatttaggttagagtatagtggtacgatttgggtttattgtaattttcgttttttgggtttaagtaatttttttgttttagtttttggaatagttgggattataggtatatgttattatattcggttaatttttgtatttttagtatagatgcggttttattatgttggtaaggttggtgtcgaatttttgattttaagtgatttattcgtttcggttttttagagtgttgggattataggtatgagttattgtatttattttttttttttttttttttttagaaatggggtttttttgttatttaggttggaatacggtggtaagattatagtttattgtatttttaaatttttgggtttaagggattttttttattttagttattttaattttaagtagaagtttaaatagtttatagttttaaattttgtgatttgtggagtgtggtggtgtatttgtagttttagttattggggaggttgaggtaggaggattgtttgagtttaggagtttgagtttagtttgggttatatagcgagattttattttttttttttttttttttatatatatatatatatatatatatatatatatatatatatatagttatggttttaatacgggtttttaatattgtgttttttaaaatttttgttttatcgatttttgttttttttttgttgacgtttttttgttttcgtattttgagttttttttttattagattttggtaggttgtttttattagtttcggacgggtatagagaggatttatagtggttgagatttattttcgttttatagttataatttttattttttgtttaggttaaagttttggttaatagaattgcggagggggtgggtggggatagaaagggtaatgacgttttttaaggttacgttatagggaatttttttttaagtgatagggaatttttattttgagaattcgttttcgatagaggttgggttgggggttgtggaggggttggaggtgttgggtgtttattgggaatggagttagagtttgtaggagataagggcgaagtttttagtgagggttattatggggatttgttgattttatttacgtttttgtttttatttttttgaaattgatacgttttgaagttttttatttttcgtaagtttataatagggtgttattttttgatatttttttcgatttttttatttttttttttttattaggtgttattttttttatttattgatttttgggaggtagtggggtgggtttttttttggttatattggggaaggatttagatagggatataggtgagattttatttattggagaagtatgaatttttttttttttttttgttttatttttaagagatttcgttgtgttgtttaggttggtttcgaatttttgggtttaagttattattttattttagttttttgagtagttgggattataggtattcgttataattatatttggtttttatgaatattttaattttggtttttgtttttatagataagtttggggtataggttgtgggttttttttaagaggttgtttttggattcgaggaattaggttttggtgagcggatttaggttttttaggtggtcgttatagtaggtttgtatgaagtttcggaaggtgttcgggtttttataggagagaggatattatagtggaggttttagttttttttaggtgttttttgttttatttattcgtttttttttgtgatttaggagtttttgtttttagttttaattttttattttttttagatttaggggttatagttttatttttattttttttttttttttgagatttaggggtttaggttttagtttttttttttttagatttaggagtttttttttattatttagtttagtatatttttattagaattattgttattcgtttttggttttgtttattattgtttttagtagtttttttattttgttttttattaggttttagcgatttatttttagttttggtggggggtttagggtttttttttgggtttttggttggtatgttaggtggaattagagggtaatttgggtaggttgggattttagaatttttttttttttttttttttatgtttattttgtgtcgttttcggtggtttaggggtagttttttgttagtttttttgttttttgtttttatttttatgtgttttttgatcgttaatttttttttaattattagttattttttttttttttttttttttttttttttttatgagatagagttagttttttgttttgttgtttagggtggagtgtagtgttatgatttcgttttattgtaatttttattttttggatttaggtaatttttttgttttagtttttcgagtagtagggattataggtatttgttattatgttcggttaatttttgtatttttagaagagatggggttttgttatgttggggtttcgaatttttgattttaagtgatttatttatttcgggtttttaaaatgttgggattatagatgtgagttatttcgttcggttgggttatttttttattttgtgttagtagttttttttgttattttgtttgtttgtggtttttttttaatggtttttttaattgttattttttgatgtttttttttattatttgattttgttgtttaggaattattttttttttttttcgtttttttgtgatttttattttgtttgagttatttttgtggatagtggagggagagtaggaggtgattttttgtttttaggggtagatattggtttagttttgttgttagttttttttttcgggttagattttttatttacgtatttggataaagtttcgtttatagagattagtcgttacgcgggggttatatgtagttagttgtgtgttttggtcggtgatttattttgtttttttaggattgtttttttttttgtagaacggggtaataatatttattttagggttatcgtgagaattaagagttattatatacgatgtatatggaatggtgttttgtatattgtttatatacgtgttaaatttttttttttttttagacggagtttcgttttgttatttaggttggaatgtagtggcgcgatttcggtttattgtaatttttgtttttcgggtttaagtgatttttcggttttagtttttcgagtagttgggattataggcgtatgttattatgtatggttaattttttgtatttttagtagagatgggtttttatttatttgttagttaggatgattttaaattttttgattttgcgatttattcgtttcggttttcgaaagtgttgggattataggtatgagttatcgtgtttggttttgtattaaaaatttaaatttttattggataatgttgatttagaatatgattttattttaatataaagtatatggtcgggcgtggtggtttatgtttgtaattttagtattttgggaggttaaggcgggcggattatttgaggttaggattttaagattagtttgggtaatatggtaaaattttgtttttattaaaaatataaaaaaattagttaggtattggttaggcgtagtggtttacgtttataattttagtattttggaaggtcgaggtaggcggattacgaggttaggatatggagattattttggttaatacggcgaaatttcgtttttagtaaaaatataaaaaattagttaggcgtggtggtgggtttttgtagttttagttattcgggaggttgaggtaggagaatggcgtgaattcgggaggcggacgttgtagtgagttaagattacgttattgtattttagtttgggtaatagagcgagatttcgttttaaaaaaaaaaaatagttaggtatggtggcgtgtgtttgtagttttaaatattttgaagattgaggtaggagaattttttgaaacgggtaggcggatgatgtagtgagttaagatcgtattattgttattattgtattttagtttgggtgatagagtgagatttcgttttaaaaaaaaaaaaaaaaatgtatatgtaaaatatagacgtatatattagtatatatttatttttttatatatgtttatatatttaaatattttgtatatatatattttatagagagataggtgtatataaatatatatatgtatatagatatgtatttttttattacgattgtatatttttatttttacgtacgtacgtgtatatatatagatgattttagtttgtattaatgtgatatttatattttatttttagttatcgatatatatatttttcgatacgtatatgtatacgtacgttatgaaacgtatatatttcgtatttatgttttacgtggttatagagttataggatatatagttatatttatatttattaggtgtgggttttatatttttttatttatttttttttatttttaatgtaggttaggattagtacgtagaggtatagggtaggtagggtttggagtttgtttttgaggagggatatttttgggggtttcgtgtttttgtttttttgtgtttaattttgcgggtcgggggaggggaggttgtatagagtagggttttttttcggttattttttcgtttggtagagattttagagagtagggtttaggtgatagtggtaattagaggttatgtttttgtgggttttttttttttttatttttttatatagtgttttgagagaagatagaggtttttgagttttttgtattgaggtaggtttaaattttgtttttattttttatgatagttttatttgttggttttagtttttttttttataaagtgggaggtatagtatatattttagtatattatttgaataaatataaagaaaggcgtagtggtttacgtttgtaattttagtattttgggaggtcgaggtgggtagattatatgaggttaggagtttgagattaatttggttaatatggtgaaaaattttgtttttattaaaaatataaaaattagttagaagtagtgatgcgtgtttgtaattttagttatttgggaggttgaggtaggagaatggtttgaattcgggaagtgaaggttgtagtgagtcgcgattatattattgtattttagtttgggtgatagagtaagattttgttttgaaataaaataaaataaaaaatgaagaaagtttttatcgtggagattggtaatataggtgtttaaagattattgttgttggttaggcgcggtggtttatgtttgtaattttaatattttgggaggtcgaggtaggcggattacgaggttaggagattgagattattttggttaatacggtgaaattttatttttattaaaaatatgaaaaattagttaggcgtggtggtaggcgtttgtagttttagttattcgggaggttgaggtaggagaatggcgtgaatttgggaggtggagtttgtattgagtcgagatcgcgttattgtagtttagtttgggcgaaagagtaagatttcgttttagaaaaaaaaaaaagattattgttgttattattattttgtgtttaattttttttagttattgggttgtagggttaggtttgtggtagggttttaatagggtttaagggttgatgagaggaaatagtaatatagttttatgtttttagtttttgtttttttttaggtgggttcgagttcgattatttttaagtattttttgagtttttaattttaatttttttttttttgggtgattttggttttagat

SEQ ID NO: 7 - DNA, 9884 bp, Artificial Sequence
  chemically treated genomic DNA (Homo sapiens)
tcgtttaggttggagtgtagagtgatatgattttggtttattgcgatttttaattttcgtttttaggtttaagtaatttttttgttttattttttttagtagttgggattataggtttgtgttagtatgtagggataatttttttatttttagtagaacggggggttttattacgttgattaggttggttttaaatttttgattttaagtgatttgtttgtttcggttttttaaagagttaggattataggtgtgagttaatatatttagtttaaaatgattttttttttaaaggaaatttattagtaagttaagtttatttattatttattttattttatttttagagatagggttttgttttttcgtttaagttggagtatagtggtgattatagtttattgtaattttgaatttttgggtttaagtaattttttcgttttagtttttttagtagttgggattataggcgtgtattattatatttagttaattttttgtattttttgtagaaagagggttttattatgttgtttaggttgtttttgaatttttggttttaagtgatgtttttatttgggttttttaaagtgttgggattataagtatgaggtattatatttagtttgttttgtttattttttttgttttaaatatatttttgttttggttggatgcggtgttttatatttatatttttagtattttgggaggtcgaggtaggtggattatttgaggttcggagtttaagattagtttgattaatatggtaaaattttatttttattaaaaatataaaaattagttaggtatggtggtacgtgtttgtaattttagttatttgggaggttgaggtaagagaattatttgaattttggaggtagagtttgtagtgagttgagattgagatattgttttttagtttgggcgatagattgagaatttattataaaaaataaaaaaaaataaaaattaaatatatttttgttttgtaattaaattttagataaattggtgtagttttttagtatggggtaaaaaaagttatttttatgttttttgtttatttttattattataaattttataaaatatttttgtaatttttttttttttttgagaggagttttgtgttgttgtttaggttggagtgtagttgagtaatttcggtttattgtaagtttcgtttttcgggtttacgttatttttttgttttagtttttcgagtagttgggattatacggggttcgttattatattcggttaattttttgtatttttagtagagatagtgttttattatgttagttaggatggtttcgattttttgatttcgtgattcgtttattttagttttttaacgtgttgggattataggtatgagttattatgttcggttttttttttttttttagatagaattttattgtgttgtttaagttggagtgtagtggttattgtaatttttattttttaggtttaagtgattttcgtgttttagttttttaaatagttgggattataggtatgtgttattatgtttagttaaagatggggtagggggtgtagggatttcgatatgttggttagatttattttgaatttttgattttaagtgattaatttgttttagttttttaaagtgttgggattataggtgtgagttattatgtcggttaattttgttgttattgttgttgttgttttgagatagttttatttttgtcgcgtatattgaagtgtagaggcgtaattttggtttattgtaatttttatttggtttattgtaatttttattttttggatttaagcgattttttttttttagttttttgagtagttggggttataggtgtgtattattatttttagttaatttttgattttttagtagagacggggttttgttatgttggttaggttggttttgaatttttgattttaggcgatttgtttgttttggttttttaatgtgttaggattatatgcgtgagttattatgttcggttttgttgtttttagaaacgatatttttttttgttagtttgtgaaagttgattgggttatttttgttatttttaattaaaatagtgttaagaggtaaagggaaaaaaaagtatttagggtatataatattgttttaaaaatgtaattatttgtaagtttggttgttgaaattgttcgttataatttaaattagtttttttgtttgtttgttttgagatggagttttattttgtcgtttaggttggaatgtaatggtatgattttggtttattgtaatttttgtttttaggtttatgtgatttttttgttttagttttttaagtagttgggattataggtattcgttaatatatttagttaatttttgtatttttagtagagacggggttttattatgttggttaggttggttttgaatttttgattttaggtgatttattcgtttcggttttttaaagcgttgggattataggcgtgagttatcgtgttcggttgatttaaattagttttatttaattagttgttaaaaataatttgtagtgattttaaggatcgttttatttagttgttattatttgttaattaaaatttgttagttttttaaaattttattagtgataatgaatttttttaaagaataatatataatagttttttttttttgttgtttgttttgatatagggttttgttttgttgtttaggttggagtgtttcggtgtgattatagtttattgtatttttaaatttttgggtttaagtgaattttttattttggttttttaacgtgttgggattataggtatgagttattgtttttggttatattttttttttataaaaataaaatttttaattatttgtttgtttttttgacgtattaaagattattttgtttgtgtgtatgttttgaatggtaattattgttttttaaatgttttaaatttatagatttgtttttgtattttattttatttggatagttttttttttttttttttttttttttttttttttttttttttttttttttttagatggagttttatttttattgtttaggttggaggatagtggtgtaatttggggtttattgtaatttttgtttttcgggttaaagtaatttttttgttttagtttttttagtagttgggattataggtgttcgtttttatgtcgggttaatttttgtatttttagtagagatggggttttgttatgttggttaagttggtttcgaatttttgattttaggtgatttattcgttttagttttttaaagtgttgggattataggcgtgagttattgcgtttggtttggatagtttttttgtatttttgatttttaggagaattgttgttttatttttttatggtttattttgaaaagagtaggatattagagaaaaggatggttaattacgtgtttataagttatgttttaggagatgatttttgtagttcggatatttatttgttttattaaaatttaggttttaggtgtaagttaggatttgggggatggaattgaaaatgtttttttaaacggtgaaaagcgggtttagcgtagaggttgaggaggaaggattatttgaagttaggagttcgagattagtttgggtaatatagagagatttttttttacgttttgtttattatcgtcgtttttataaaaaaattagttaggtatggtggtgggattataggggtataggttgaggttagaggattgttttagtttaggagttttaggttgtaatgaatggtgataaatttattgtatttttttttgggtaatagagtgagattttgttttaaataaaataaaataaataaataaaaaaaaaagaaaagtgaaggtaacgttaataagtgtttattatgatataataatattagtattatatatatatattaattttgtatatattattaaaattttagtatggtaattttgtggagaaaaaaaaaaagtttatttaggtaagtatagaaagtgtttttttattatttttttttgattttaaatgaagaagtagagtttttaatagtatgaattagatgttggtagaggaaaaagcgagttttcgttttattttggtgtaaatttttgattttggataatttttagtaggattggtaatgatttttttaggtttttttgtgattgttgatatattttttttaatttaaagtttcggaatatatgtttaggacgtgtaggtttgttatataggtaaatgtgtgttatggtggtttgttgtaattattattttattatttaggtattaagtttcgtatgtattagttatttattttgatgtttttttttttcggttattaggatttttaaatagtttgttttaatttattgataggatttttttagaatgaatttaaaaaagttgggaatttttaatttgagcgtagatcggattacgtggaacggtgttggtgtttgttaaaaatttagattgtttcgaattttcgatttagagggtttgaagtggggttaagatttgtagattaacgggtttcgtgggaggttttttgttggtggttagtttcggggtttagttgtttattgttgttattcgtgttaaattacggtttaatattatcgatattattaatcgttttggtttttaagatagtcgcgattttagacgggtgaggtttttattttttagtattagatggggtttgggaattgttgtttagtagatttagttatttacgtggttattcggggtaattataaggtcgatttaaaagattaaaataaatgtataacgaatgttaggattaaagtcggaatatatttaattatttattttgaggtttaaatttaaaaatgttatataaaaaaataagtaatttgttaaaaaatgtagagtggcggcgggggcggggggagaggtggtgaacgcgaggggtagtattttcgggttaggtgggtcggttgttttgattttttttgcggttcggttattttgttttagttagttcggaggttgcggttgtagaagtatcgtttgcggagtaattgtaaagatgttgttcgtgcgcgttgttgcggtcgtggttcgcgttttttttcggcgggtcggattggtgagtatcgaaggtcggtatgatgtaggcggtcgggtggggttgtagggtggtggtgcgtcggttcgggcgttttttgtaggagggcgaggggttgtggcgaatgtcgttattttgtattcgtggttttttcggttggatagagtaggcgatataggtgtttttttgttcgttatttgcgtagaggtagaatggtatagggtagatagttaattcgatggtgtttagagatagggttttaagatttttgttttcggttgatagcggttttagaagggggattttgggtgaaggttagggtttgggcgttagtttttcgaggtttgttttgaatcggtgaggtttttttttttcgatttttagggtcgcgtttcgttgaaggttagaaaattgttgttagtttttgttgaagttagttagtggagtttgatattgtgtgaaggttagtaggtttagtattttatttttgtttggagtttagtttagaggaaaggaataaatgaaggtggtttttggaatatttacgtaggtttttttttagtgttgaatacgaaacgatcgtgaaaacgttttgtaggtgtaaagaattattttatgtggttagtattgtgataatagtgaagttggtttttaaattgttttttcggtagagtgtgtgttttgtggtatttggacgtgtttaaagaatttgtttttgagttttttatttggttttgagtaatttttagtgatggagaatttaagtaaaagagaataaggttggaaaatggttgtaaggattaatatttttcgttatttgttttttttgaaattaatatgattttagtgtaaacgtattgatattgatattttttttttgttttaaaagtaattttaatttgaaaggtgaaataaatatgttggttgttttgttgttttaataatcgttggtagtattttgggtttttgttaataaaaaagtatttttaacggtttttatttagtttttatggaaggtagaggttttagaattgatagtgattagtcgtagtattataatttgaaggagaaattgaaggaagttttaggtggttgtaggatttgttgagagagtaaaataagtttatatgttttaatttttggtttttaatttaattttagtatttatttagtttttgtttgtttggtttttttttttttttttttttttgagatggtgtttcgtttagtcgtttaggttggattgtaatggcgtgattttcgtttattgtaattatcgttttttaggattaagtgatttttttattttagtttttcgagtagttgggattataggtattcgtcgttatgttttgttattttttgtagtttttcgtagagacggggttttattatgttggttaggttggttttgaatttttgacgttaggtgattcgttcgtttcggttttttgaagtgttgggattataagtatgagtcgtcgtgttcggtcgtttgttgtcgttgttgttgttgttgtttttaagtaaaattggaattattttgagttttgttttttgtaggaagttgtttattttagaatttttgtaattttattaaaatatatttaaagttaaaataataaaaattgggtattttaaagggaaagatatttatattttgttaatagtggggggggggggttttcggggttttaggttttttttttttttttttttcggggttttaaaaaggaatttttttttaaaaaaaaaaaaaaaaaaaaaaaaagaaagaaaaagaaagaagaaaaaaagaaaagaaaaaagaaattagagtagttggtgaaagtttatttattttttgtataaataggatttagtttggttgtaagtaatagaaaattttaaaataatagtggtttagataaggaagaggtttattttttttttatttataagtttttgattggttattttagggttggtatggttgtttttggggtgaggatttatatttttgtttgtttattttagtggtgtttggtttaatgtttggtatatgatagatttttagtaatatttattgaatgattgaaaaaattattaattaatagaaggatattgaaaaatttttgatatgtagaattaggatgattttttaaagagtgggtttatttttagtgtttttaatagtatgtgcggatgttagttttattttgttagttatagttattgtttttttttttgtttatttaataagtaaaatttggtgttttatttaatttttatttgcgtttttattattagggagagtgtatatttggttatttttttgtaattttttttttataaatggttttgtttttttttttatgttttgtttgtaaatttatatgtatattttaaaatatatatttttgtatatatatacgtgtgtgtgtgtgtgtgtgtgtgtgtaatttatatgttttaatatttagtataggtatgatatagtgagaggtagtttttaggtttttaagtttttgtattggatattttcgggtttgatttttagtttggttttttttaagttaaagaatgtgtgtgttcgtgtttaaattatttagttttttttagttttgtttttttatttgtaaaatgatatatgtatatggattttgaaaatattttatatagttaagtttattgatttaaagttttgtgattttttttattatatttcgaggttttttgtggtttaagttttatttaatatgtgttttatgattgggcgttgtggtttatgtttataattttagtattttgggaggtcgaggtgggataattgtttgagtttaggggtttaagattagtttgggtaatatattgagattttgtttttataaaaaaaattttaaaattagtaaggtatggtggttagtatttgtagttttagataattaggaggttgaggtagaaggattatttgagtttatgcggttgaagttgtagcgagtcgtgattatattattgtattgtaatttggatgatagagtaagacgttgttttattaaaaatattgttttttgagtatgagggtttaagtgttttgatatttgtagaagttagagatttgtgtggatttgtaaaatgaggaggaggtggatttttgtttttagggttttatattttttttaaggaagtaaataaagatgtaggatattaatgggaaatagattgatttatttttttttaggttaaaaagagtggtttatttgtcgggatggtggtttttgtttgtaattttagtattttgggaggttaaggtaggtggattacgaggttaggagattgagatttttttggttaatacggtgaaaatttcgtttttattataaagtagaaaaaaattagttcggtgtggtggtatgtgtttgtagttttagttatttaggaggagaattgtttgaatttgggaggtagaggttgtagtgagtcgagattgtattattgtattttagtttgggtgatagagcgagatttcgttttttaaaaaaaaaaaagtggtttattggggtaagtttttttttttttttttttttttttttttttttagtagagatggggttttattatgttggttaggttggtttttaatttttgattttatatgatttattcgttttggttttttaaagtgttgggattataggtatgagttatcgtgttttgttaatagttgttttttaaaatattgattgttaggtcgggtgtagtggttgacgtttgtaattttagtattttgggaggttaaggtgggtgtattatttgaagttaggagttcgagattaatttggttaatatggcgaaattttgtttttattaaaaataaaaaaattagtcgggtatggtggtggtcgtttgtagttttagttatttaggaggtcgaggtatgagaatcgtttgaatttgggaggtgaaggttgtaatgagttaagatcgtgtttttgtattttagtttgggtgatagaatgagatttcgttttagaaggaaaaaaaaaatgtgtgtgtatatatatatttattgtttagtaaatatatatttatttattgtttagtttgggtaatatgatgaaattttgtttttataaaaaaaataagtataaaaattagtttggttaggtggcgtatttttgtgattttatttattggggaggttgaggtgggaggattatttgagtttaggaagtcgaggttgtagtgagtcgtgattgagttattgtatttcgatttgggtgataagagtgagattttgttttaaaaaagaaaaaaaaataagtcgggtgcggtgtttacgtttatagttttagtattttgggaggttaaggcgggtggattatttgaggttaggagttcgagattagtttggttagtatggtgaaatttcgtttttattaaaaatataaaaaattaatttggtggaggtggcgtatttttgtagttttagttattcgggaggttgagaatcgtttgagattaggaggtggaggatgtagtgagtcgttttaaaaaaataataataataaagtatagattgtattttaaaaatatgcgagtgtttattgtgtattaggagttgtataaaaggtttttatatatattaaaagttatttttttatttgatattttaaataaaatgttttatatgtaattagtatttttattagtattttgattatattaagttggtatttgtttaagtttgtaagttttataaaggttttgttaaaaattaaatttttaagaatatttttgtattagg

SEQ ID NO: 8 - DNA, 9884 bp, Artificial Sequence
  chemically treated genomic DNA (Homo sapiens)
tttagtgtaaaagtatttttaaaaatttgatttttaataaagtttttataaaatttataagtttaaataaatgttagtttagtgtgattaaagtattggtgaaaatgttaattatatataaagtattttgtttaaaatgttaaatgggaaagtagtttttgatatatgtgaaaattttttatatagtttttagtatatagtaaatattcgtatatttttaaaatgtagtttgtattttattattattgtttttttgagacggtttattgtattttttattttttagttttaagcgatttttagtttttcgagtagttgggattataggggtgcgttatttttattaggttaattttttatatttttagtagagacggggttttattatgttggttaggttggtttcgaatttttgattttaagtgatttattcgttttggttttttaaagtgttagaattataggcgtgagtatcgtattcggtttattttttttttttttttgggatagggttttatttttgttatttaggtcggagtgtagtggtttaattacggtttattatagtttcgattttttgggtttaggtgatttttttattttagtttttttagtaggtgggattataggagtgcgttatttggttaggttaatttttgtatttattttttttatagagataggattttattatattgtttagattgggtagtaaataaatatatatttattgggtagtaaatatatatatatatatatattttttttttttttttgagacggagttttattttgttatttaagttggagtgtaggggtacgattttggtttattgtaatttttattttttaggtttaagcgatttttatgtttcggttttttgagtagttgggattataggcgattattattatgttcggttaatttttttatttttagtagagatagggtttcgttatgttggttaggttgatttcgaatttttgattttaggtgatgtatttattttggttttttaaagtgttggaattatagacgttagttattgtattcggtttggtagttagtattttaaaaagtaattattggtagggtacggtggtttatgtttgtaattttagtattttgggaggttaaggcgggtggattatgtgaggttaggagttggagattagtttggttaatatggtgaaattttatttttattaaaaagaaaaagaaaaagaaaaagaaaaagaaatttgttttagtaaattatttttttttttttgggaaacggagtttcgttttgttatttaggttggagtgtagtggtgtagtttcggtttattgtaatttttgttttttaggtttaagtaattttttttttgagtagttgggattataggtatatgttattatatcgggttaatttttttttattttatagtagagacggggtttttatcgtgttagttaggaaggttttaattttttgatttcgtgatttatttgttttggttttttaaagtgttgggattataggtaggagttattatttcggtaggtaaattattttttttagtttgaaggagagtaggttagtttgttttttattagtgttttatatttttgtttgtttttttaagaagaatgtaggattttgagggtaggaatttattttttttttattttgtaggtttatataggtttttgatttttgtaaatgttagaatatttaagtttttatatttaaaagatagtatttttagtgagatagcgttttgttttgttatttaggttgtagtgtagtggtgtaattacggttcgttgtagttttaatcgtatggatttaagtgatttttttgttttagttttttgattatttgggattgtaggtattggttattatgttttgttaattttaaaattttttttgtagagatagggttttaatatgttgtttaggttggttttgaatttttggatttaagtaattgttttatttcggttttttaaagtattaggattataggtatgagttatagcgtttaattataagatatatattgagtaaaatttggattatagaaaatttcgaagtgtaatagaagaaattataaaattttagattaataaatttgattgtataaagtgtttttaaaatttatatatatatattattttatagatgaggaggtaaagttgaggaaagttgaataatttgaatacgggtatatatattttttggtttgaaaggagttaaattgggaattaaattcgggaatgtttagtgtaaaagtttgagggtttgaggattgttttttattgtgttatgtttatattggatgttagaatatgtgaattatatatatatatatatatatatatacgtgtatatatataaaaatatatattttaaaatatgtatataaatttataagtaaagtatgaggaagaaaataaaattatttgtaaaagaggaattataagaaaataattaaatgtgtattttttttggtgataaaaacgtaaatgaaagttgaataaggtattaagttttgtttattgaatgagtagaaaaaaagataatagttatgattgatagagtgaaattagtattcgtatatattattgggaatattgagaataggtttattttttaggaaattattttggttttatatattaaaagttttttaatgtttttttgttagttaatggtttttttagttatttagtaggtattattgagaatttgttatgtgttaggtattgaattaggtattattggagtaagtagataggagtgtgggtttttattttaagggtagttatgttagttttggaatgattaattaggggtttgtagatgagagagaaataaattttttttttgtttaggttattgttgttttggggttttttattatttgtagttaaattgaattttatttatatagaaggtaagtgagtttttattagttgttttggttttttttttttttttttttttttttttttttttttttttttttttttttttttttttttttttttgaaaaaaaatttttttttggggtttcggggggggggggggggggggatttggggtttcgggaattttttttttttattgttaataaaatgtaagtgtttttttttttaaggtatttaatttttattattttgattttagatgtattttaatggagttgtaggaattttaagataaatagttttttataaggggtaaaatttaaagtagttttaattttatttaaaaataataataataataacgataataagcggtcgggtacgacggtttatgtttgtaattttagtattttagaaggtcgaggcgagcggattatttgacgttaggagtttaagattagtttagttaatatggtgaaatttcgtttttacgaaaaattataaaaagtagtagggtatgacggcgggtgtttgtaattttagttattcgggaggttgaggtgggagaattatttgattttgggaggcggtggttgtagtgggcggagattacgttattgtaatttagtttgggcgattgagcgagatattattttaaaaaaaaaaaaaaaaaaaaaaattaggtaaataaaaattgaataaatgttagagttagattagaaattaagagttggggtatgtggatttattttatttttttaataaattttgtagttatttggaattttttttagttttttttttaagttgtaatattgcgattggttattgttaattttgaagtttttattttttataggagttagatgaaaatcgttaaaaatgtttttttgttaatagaaatttaagatgttattagcggttgttaaggtagtaaaatagttaatatgtttattttattttttaaattgagattatttttagaataaaaaaaaagtgttagtgttaatgcgtttatattgaaattatgttaattttaagggaaataaataacgaagggtattaatttttatagttattttttaattttgtttttttttatttgaattttttattattaaaaattatttaaaattaggtggaaaatttaaggataaattttttaaatacgtttaagtgttataaagtatatattttgtcggagagataatttagaaattagttttattgttgttatagtgttggttatatgaaatggttttttgtatttgtaggacgtttttacggtcgtttcgtatttagtattaagagaaagtttacgtaagtattttaaaaattatttttatttattttttttttttaaattgagttttaggtagaggtgaaatgttgggtttgttgatttttatataatgttagattttattgattagttttaataagagttgatagtagttttttgatttttagcgggacgcgattttaagaatcgaaagagaggaattttatcgatttagaataggtttcggagagttagcgtttaagttttgatttttatttaagattttttttttagggtcgttgttagtcgaagataggaattttgaggttttgtttttggatattatcgagttaattgtttgttttgtattattttgtttttgcgtaggtgacgagtaaaagggtatttgtgtcgtttgttttgtttagtcggagaagttacgggtgtaagatggcggtattcgttatagtttttcgtttttttgtagagagcgttcgagtcggcgtattattattttgtagttttattcggtcgtttgtattatgtcggttttcggtgtttattagttcggttcgtcgaggaagggcgcggattacggtcgtagtaacgcgtacggatagtatttttgtagttatttcgtaggcggtatttttgtagtcgtagttttcggattgattgggataaaatggtcgagtcgtaaagaaggttaagatagtcggtttatttgattcggaagtattgtttttcgcgtttattattttttttttcgttttcgtcgttattttgtattttttggtaggttatttatttttttatgtaatatttttaagtttaaattttaaaatgaatgattagatatatttcggttttggttttggtattcgttatatatttattttggttttttgagtcgattttgtggttgtttcgggtgattacgtgggtagttgaatttgttaagtagtagtttttaggttttatttggtgttagaggatgagggttttattcgtttggggtcgcggttgttttgaggattagggcgattaatagtgtcggtagtgttagatcgtggtttagtacgagtagtaatagtgaatagttaaatttcgggattggttattagtagggagttttttacggagttcgttaatttgtagattttagttttattttagattttttgagtcgaaaattcggggtaatttgaatttttaataaatattagtatcgttttacgtgattcgatttgcgtttaggttaaagatttttagtttttttagatttattttaaaagaattttgttagtgaattagagtaaattgtttaaaaattttgataatcgggggaggggagtattaagataaatagttaatatatgcggagtttaatatttaggtgatgggatgatagttatagtaaattattatggtatatatttatttgtgtaataaatttgtacgttttggatatgtatttcggaattttaaattaaaaaaaatatattaataattataaggaggtttagaagagttattgttaattttattgagaattgtttagaattagaagtttatattaggataggacgaggattcgtttttttttttgttaatatttagtttatgttattgggaattttgtttttttatttggagttaaagggagatgatgaaaaaatattttttatgtttatttggatgggttttttttttttttttatagaattattatattgagattttggtgatatatgtaagattggtgtgtgtgtgtgatgttggtattattatgttatagtggatatttattaacgttgtttttattttttttttttttttatttatttattttattttatttaagatagggttttattttgttgtttaggaaagagtgtagtgggtttattattatttattgtagtttggaatttttgggttggagtaattttttgattttagtttgtgtttttgtggttttattattatgtttggttaatttttttgtaaagacggcggtggtgggtagggcgtggggggaggtttttttatgttgtttaggttggtttcgaatttttggttttaagtgattttttttttttagtttttgcgttgggttcgttttttatcgtttggagaagtatttttagttttattttttaaattttggtttatatttagaatttgaattttggtgaggtaaataaatattcgggttataagggttattttttgaaatatggtttgtaaatacgtgattagttatttttttttttagtattttattttttttaaggtaagttatgggaaaatagagtagtagtttttttgggaattaggggtataaaaaggttgtttaagttaggcgtagtggtttacgtttgtaattttagtattttgggaggttgaggcgggtggattatttgaggttaggagttcgagattagtttggttaatatggtaaaattttatttttattaaaaatataaaaattagttcggtatgggggcgggtatttgtaattttagttattggggaggttgaggtaggagaattgttttaattcgggaggtagaagttgtagtgagttttagattgtattattgttttttagtttgggtaataaaagtgaaattttatttaaaaaaaaaaaaaaaaaaaaagaaagaaaaaaagaaaagaaaaagaaaaaggttgtttaagtaaaataaaatatagagataaatttataaatttaaaatatttgggaagtaataattgttatttagggtatatatataaatagggtggtttttggtacgttagaagaataaatagatggttagaggttttatttttgtaaaagagaaatatagttaggaatagtggtttatgtttgtaattttaatacgttgggaagttaagatgagaggtttatttgagtttaggagtttgggagtgtagtgagttgtgattatatcggaatattttagtttgggtaataaagtaagattttatattaaaataaataataaaaaaagagaattgttgtatattgttttttaagaaagtttattgttattagtaaggttttggggagttggtaagttttgattggtaagtaatggtaattaggtaaaacgatttttagagttattgtaggttgtttttagtagttaattagataaaattggtttaggttagtcgggtacggtggtttacgtttgtaattttagcgttttgggaggtcgaggcgggtggattatttgaggttaggagtttaagattagtttgattaatatgatgaaatttcgtttttgttaaaaatataaaaattggttgggtatgttggcgggtgtttgtaattttagttatttgggaggttgaggtaggagaattatatgaatttggaggtagaggttgtagtgagttaaaattatgttattgtattttagtttgggcgatagagtgagattttattttaaaataaataaataaaaaaattggtttaggttatagcgggtagttttagtagttaggtttatagataattatatttttggagtaatgttatgtgttttgagtgtttttttttttttttattttttgatattgttttagttggggatgataagaatgatttaattaatttttataagttaataggaaaaaatatcgtttttaaaaataataaggtcgggtatggtggtttacgtatgtaattttagtatattgggaggttaaggtaggtagatcgtttgaggttaggagtttaagattagtttggttaatatggtaaaatttcgtttttattaaaaaattaaaaattagttgggggtggtggtgtatatttgtaattttagttatttaggaggttgaggaaggagaatcgtttgaatttaggaggtgaaggttgtagtgagttaggtggaggttgtagtgagttaagattgcgtttttgtattttagtatgcgcgataggagtgagattattttaaaataataataataataataataaaattagtcggtatggtggtttatatttgtaattttagtattttgggaggttgaagtaggttgattatttgaagttaggagtttaagatgagtttggttaatatatcgagatttttgtattttttgttttatttttagttgggtatggtggtatatgtttgtaattttagttatttaggaggttgaggtacgagaattatttaaatttgggagatggaggttgtagtgattattgtattttagtttgggtaatatagtgagattttgtttgaaaaaaaaaaaaaggtcgggtatggtggtttatgtttgtaattttagtacgttgggaggttgaggtgggcggattacgaggttaggagatcgagattattttggttaatatggtgaaatattgtttttattaaaagtataaaaaattagtcgggtgtggtggcgggtttcgtgtagttttagttattcgggaggttgaggtaggagaatggcgtgaattcgggaggcggagtttgtagtaagtcgagattgtttaattgtattttagtttaggtaatagtataagattttttttaaaaaaaaaaaaaaattgtagggatattttgtaaaatttgtagtgataaaagtggataaaagatataaagataattttttttgttttatattgaagggttgtattagtttatttgaaatttggttatagagtagagatatatttagtttttgtttttttttgttttttgtggtggatttttaatttgtcgtttaggttggagagtagtgttttaattttagtttattgtaaattttgtttttagggtttaagtgatttttttgttttagttttttaagtggttgggattataggtacgtgttattatgtttggttaatttttgtatttttagtagagatggggttttgttatgttggttaggttggttttgaatttcggattttaggtgatttatttgtttcggttttttaaagtgttgagaatataggtgtgaggtatcgtatttagttagagtagagatatgtttgaagtaaaaagaataagtaagataggttgggtgtggtgttttatgtttgtaattttagtattttgagaggtttaagtgggagtattatttggggttaggagtttaaaaatagtttgggtaatatagtgagattttttttttataaaaaatataaaaagttagttgggtgtggtggtgtacgtttatagttttagttattaaggaggttgaagcgggaggattgtttgagtttaggagtttaaggttgtagtgaattgtgattattattatattttagtttggacgaaagagtaagattttgtttttaaaaataaaataaaataaataataaataagtttggtttgttagtaagttttttttgaaaagaaaattattttaggttgggtgtgttggtttatatttgtaattttagttttttgagaggtcgaggtaggtagattatttgaggttaggagtttgagattagtttgattaacgtggtgaaatttttcgttttattaaaaataaaaaaattatttttgtatgttagtataagtttgtaattttagttattagagaggatgagataggagaattgtttgagtttggggacgggggttggaggtcgtagtgagttaagattatgttattttgtattttagtttaagcga

SEQ ID NO: 9 - DNA, 4001 bp, Artificial Sequence
  chemically treated genomic DNA (Homo sapiens)
tatggaaagtgtaaatagtgttcggtgtaaagtaggagttgtgataagtggatttttttttagaaatgggatttcgggttaggagtagtggtttacgtttgtaattttattattttgggaggttaaggtgggtggatcgtttgaggttaggagttcgagattagtttggttaatatggtgaaattttgtttttattaaaaatataaaaattaggtacgtgtgatggtgtatgtttgtaattttagttattcgggaggttgaggtaggagaatcgtttgaattcgggaggtgaaggttgtagtgagttgaaattttgttattgtatcgtagtttgggcgataagagtaaaattttatttgaaaaaaaaaaaaaggaaagaaagaaggaaagagaaggaaagaaagaaggaaagagaaaggaaggaaagaaagaaagaggaaaaaaggaaaggaaaaggaaaaagaaaagaaagaaaaggaaggaaagggagaaatgggatgtttgttaggtgtagcgttttggggaggcgtggagagtttataatagggattaaggtgttttttagtcgtagaatatggattatttgttaggtgtggttttggtatatttaggttattggttttgtcgatttgttaaatttaattatttgggtattttttcggttaatatagaggatgtttttatgtgaatacgtgtttatttgtgaaatgtttataatgttaaaggttcgttttggggtaaatatttgatagcgtttggtaaatttaataaatgttttttttgtaatgagtaagttttttaatgtttaaagaaatagttgaattcgttagtaatatgtcggatgttttttttatgtttgtatattttttcgttagtttttttttttttttttttttgagacggagtttcgtttttgttgtttaggttagagtgtaatggtgttatttcgttttatcgtaatttttatttttcgggtttaagcgagttttttgttttaacgttttgagtagttgggattataggtatgtgttattacgtttggttaattttgtatttttagtagagacggggtttttttatgttggttaggttggtttcgaattttcgattttaggtgattcgttcgtttcggttttttaaagtgttgggattatcggcgtgagttatcgcgttcggttcgttagttttaatatttatgttttttggagggtgaagggtttgaaaggtattaaaaattttggtttttaggagcgagttaaatttttttttttagagattgaaggaggttattcgatttcgtttttaggaaaatttaattcgtaatttttttttcgttttggtttttttaggttttattattcgcgtcggggagacgcggttcggtttacgttaggtcggtaagaatttattaggttttaggagggcggggtcgagttttagaagtcggggttcgggttaggagttttggtgtaggcggattcgggcgcgtgttatgggattataattttcggtacgtatcgcggattgcgtcgaatacggttggttgggagatttaattttattgtttttatcggttaatgggacggaggaaagaggtttgattcggattttcggaggttaatggtaatatagaggaggcgggtgtttttttattatttattttgcgtttagagaagttatatttaaaaggtcgtgtcgggtcgggttttcgtaggtagtgggattagagtcgggaggggcggcggtgtttcgggaaagcggtttttggggtattcgggttttttcgaggcgggtttcggacgtcgtcgtgggcggggtcgagggcggggtttggtttcgttgtggagcggttcgtaatttattatggcggtcgcggggtttggtgtttgtgtttgagtagcgttggagtcggagtcggttttcgggttttgcggttgaggagttttttcgttgtttacggtttttatcggcggggggcggttgggtttttcggcggagttcgggagatgtgattgtttgagggcggtggtggtgttagcgttcggggtcgggggagggggtgtttcgggtagagattttcgggtttggggtagttgaggcggtcgggttttttttatacggggttcgtttttcgttgtttgggtcgcgagagtttttcgttttttatagtttcgtttcggttttgggatattgcgggtggtttgttttttttagtttgggatatttcgttttttgaggcgtggaagagcgtcgtttcggagtaagttgttcgtgtcgcgtttcgatagttttttttagttttaagtcgttttttatttcggatttcggttttaattttggttacggagttttttatttaaattttttttttgttgttaaggggttttttttttttttaaggtggttttcgcgagtttttaatgttttgattttttttaatgttatttacggtttttttagttttagtttagttaaaaattttaatgtaaaggaaaagtttggattggttttataggttttttaaaaagcggatttaaaagttgttggtaatgtattttttttcgttagagtcgagggtaaattcgttgaaatttgggtgattcgtgttttttttcggagagtaaagtagagaagcgagagcggttattagttcggtaggaaatttgttggaagatgaagaagttaagatagggggttggtgatttttataggaaaagttttggaggagtagttaaagattattagcgttttttttatgtgtgagaattgaaatgattagtattattgattttttttagtattttttgtgaatatttttgtttaggtttttttttttgaaaagaaattgttatttagttcgtttaaaataaattaagaaatttttgggtaatattgtaattatatgaaattgataatcgcgaaaataattggaatttttgtttgtaagtgttaatttaaaaaaagtgtttttttttgttatggaagatgtttttttgtgattgattttaattgttgatttgtggagatgtagcgaatgtgaaattttacgtatatgttatttttttttacgttcgttgatcgttttggaagattttgaatttttttttggaaaggggtatttattattattttatggggtagtagtttggaaaagtatttggggattaaagaaggttaagtttgtttgttttgtattttattaaaggagtagggaagaaggaattatcgaggtatgggggtttatattgtaatgtttttgtggaatatggtgagtgttttttaaaatttttgtttatggttttttttatgtatttattttaggtttttaaggaattttgaataatagtatttgcgatagttttttttaattttatttaataaatttgttattgtagttattttttagtggaattttttttgtataagaaaaagttatttcgtgatttcggttttatttaaaatttatttgagttgtttattttttgtttgatttttttgttaatttattgttgattttggataagttattttattgttttagggttttagttttttgaggggttggattttagtggttttttagggtttttggttttatgattttgttttaatcgaagtcgtgggtttttttgataagtatggattttttattgttttgtttatagagagtttttattatatttttaaagtggtttgtgtttttgagaaagttaagaattatagatattggttgacgttaatatttttgattttttttttcgtaagtaggatttgaaaatatttattttggagttatgtgggaaaaattaagtggggaagtagtattttttgtgaattttagatagatagtttttgttttattttttataaggagtaatttttttttcgttgatgaagtttttattttgttttttttttgtttagaatgatatttgggttaataaaggttatttgtgatatttttatgaatatatttggtatttgaatgttgttcgtatatt

SEQ ID NO: 10 - DNA, 4001 bp, Artificial Sequence
  chemically treated genomic DNA (Homo sapiens)
aatgtacgggtagtatttaaatgttaaatatgtttataaaaatgttatagataatttttattggtttaaatattattttaaatagggagaagataggatgaaagttttattaacgaggaagagattattttttatggaaggtaagatagaagttgtttatttaaaatttataaggaatgttgtttttttatttgattttttttatatggttttaaagtgagtatttttaagttttatttacgaaggaaaaggttaaggatattagcgttaattagtatttatgatttttaatttttttaggaatataaattattttgagaatatgataaaagttttttgtagataaagtagtaaagaatttatgtttgttagaagagtttacgatttcggttagagtagaattatagaattagggattttaagaaattattgaagtttagttttttaggaaattaaagttttggaatagtaaagtggtttgtttaaggttaatagtgaattagtagaggaattaggtaagaaataagtaatttaaatagattttgaataaagtcgaagttacgaagtaatttttttttatataaagaaagttttattaagagataattatagtaataaatttattaagtggaattggaaggaattgtcgtaagtattgttgtttaaagttttttgaaggtttaagatgaatgtatgaggaaaattatgagtagaaattttgaaaagtatttattatgttttataaaaatattgtagtgtggatttttatgtttcgatgatttttttttttttgtttttttgataaaatgtagggtaggtaagtttggttttttttggtttttaagtatttttttaggttgttgttttataaagtaataataggtatttttttttagaagagggtttaagattttttagaacggttagcgagcgtagagggaaatggtatatacgtgggattttatattcgttgtatttttataagttagtaattgaagttaattatagaaagatattttttataataaaaggaagtattttttttaggttgatatttgtaagtaggagttttaattattttcgcggttattaattttatgtaattgtaatgttatttaaaagttttttgatttgttttaaacgggttgaataataatttttttttaagaagaaaaatttaaatagaaatatttataggggatgttgaaaagggttaataatgttagttattttaatttttatatataaaggaaacgttgatggtttttggttatttttttagaattttttttgtggaagttattaattttttattttagtttttttattttttaataaattttttgtcgaattagtggtcgttttcgtttttttgttttgtttttcggaaaaggatacgggttatttagattttagcgagtttgttttcgattttgacgaaaaggaatgtattgttagtaatttttaagttcgttttttaaaaggtttgtggaattaatttagattttttttttgtattaaagtttttggttgagttgagattaagggggtcgtaggtgatattggaagaagttagggtattagaggttcgcgggagttattttgggggaaggggagattttttgatagtaagggagggatttgaatgggaggtttcgtggttaaagttggggtcgggattcggaataaggggcggtttggggttgagggaagttgtcggggcgcggtacgggtagtttatttcggggcgacgtttttttacgttttagaaaacggggtgttttaagttgggggaaatagattattcgtagtgttttaaagtcggggcggggttgtaagggacgaaggattttcgcggtttagatagcggaaggcgggtttcgtgtagaggaggttcggtcgttttagttgttttaagttcgggggtttttgttcgagatattttttttttcggtttcggacgttgatattattatcgtttttaggtagttatatttttcgagtttcgtcgagggatttagtcgtttttcgtcggtaggggtcgtggatagcggaggggttttttagtcgtaggattcgggaatcggtttcggttttagcgttgtttaggtatagatattaaatttcgcggtcgttatgatggattacgagtcgttttataacgaggttaggtttcgttttcggtttcgtttacggcgacgttcggagttcgtttcgaggggattcggatgttttaagagtcgttttttcgggatatcgtcgtttttttcggttttggttttattgtttgcgaaagttcggttcggtacgattttttaaatgtggtttttttgagcgtaaggtgagtggtaaggaagtattcgttttttttgtattgttattggttttcgagaattcgggttaggtttttttttttcgttttattggtcggtgggagtagtagggttggattttttagttaatcgtgttcggcgtagttcgcggtgcgtgtcgggagttgtggttttatggtacgcgttcgagttcgtttgtattaagatttttggttcgggtttcgatttttggggttcggtttcgtttttttgggatttggtagatttttgtcggtttagcgtaggtcggatcgcgttttttcggcgcgagtagtgagatttggaagagttaaagcgagggaaaaattgcggattggatttttttggaagcggagtcggataattttttttagtttttaagggagaaaatttggttcgtttttagaaattaaggtttttgatgttttttaagttttttattttttaaaaagtataaatattagaattagcgggtcgggcgcggtggtttacgtcggtaattttagtattttgggaggtcgagacgggcggattatttgaggtcgggagttcgagattagtttgattaatatggagaaatttcgtttttattaaaaatataaaattagttaagcgtggtggtatatgtttgtaattttagttatttaggacgttgaggtaggagattcgtttgaattcgggaggtagaggttgcggtgaggcgagatggtattattgtattttagtttgggtaataagagcgaaatttcgttttaaaaagaaaaaaaaaaaaaaattagcgaagaaatatatagatatagggaaaatattcgatatgttgttaacgaatttaattgtttttttgggtattaggaggtttatttattatagaaaaggtatttgttgggtttgttaggcgttattagatgtttgttttagaacgaatttttaatattataaatattttataggtggatacgtgtttatatgaaaatattttttatattagtcgagaaaatgtttagatggttgggtttagtaagtcggtagaattaatgatttagatgtgttaaagttatatttaataaataatttatgttttgcgattaaaaagtattttggtttttattataggttttttacgtttttttagagcgttgtatttgataggtattttatttttttttttttttttttttttttttttttttttttttttttttttttttttttttttttttttttttttttttttttttttttttttttttttttttttttttttttttttttttttttttttttttttttttagatggagttttgtttttgtcgtttaggttgcgatgtagtaataggattttagtttattgtaatttttatttttcggatttaagcgatttttttgttttagtttttcgagtagttgggattataggtatatattattatacgtgtttaatttttgtatttttagtagagatagggttttattatgttggttaggttggtttcgaatttttgattttaagcgatttatttattttggttttttaaagtggtgggattataggcgtgagttattgtttttggttcgagattttatttttaaggagggatttatttattatagtttttattttatatcgagtattgtttatattttttata

SEQ ID NO: 11 - DNA, 5525 bp, Artificial Sequence
  chemically treated genomic DNA (Homo sapiens)
atttttttttatggtaattgggattagattgttttatttttcgatatttttgtaagatttttttatgaatattttgatatttttttgagtttggagaaaggcgttttttttgtgtatttagtttgataaattttttagttatagtttttattttggtatgtaaagttttgtatttattatattttgtattgacgttatttttataatttcggcgttgtttataggagatgatagtaatatattttattaaataatttgggagtttaattgttgaaggttttatggaggtagtgtaattttttttagtttttttattggaatttggattggagttatttagtttggtaattttttttttttttttaagatttttttttttttttttaatagttttaatgtcgtgtttttttatttggtttttttttttatgttttttagatttttttttggattttttgtgagatattgaatggtttttttttataggttttggatattttaatagaattgaattagggggtaaggtttttagagaagttttagaggtatatttgttttgttggtttttatagatattattgttttgattaaaattgttaataggtaggttttgagttttcggttttttggagtgttaggggaattggagttagaatttataatttgaggaggatgtgaaatcggtagatgggttgaaggtaagcggtggaggggtggggatggtagtagttgtagggggtagagggaggtttgtagtagattttttattggtgggatttaaatgattatttagtgttggtggtattttgttcgttaggtgagatattcgggtttttttatttattaaatgattaataaattttgaatttaaaagtcgtgtttgaggagaagatatagcgtttttattagaatatattggagattttgaacggttggtgtttgtagtattttgagatggatttagttttttagagagtattgattttaatgattaagtgtttattttattgtatttaggttagtttttttgaagttttttaaaaatataattttttgaagtatacgagaggtttttaggatttagattggttatttgttgtagaattgtttttagggagtttttgtttttttgattgatattatttttttggagtttagtaagtagtttcggttttttgtaggtttttagggttagtaagtgaattattttgtttttgtatggtttttgagagacgttgttgttgttgtgtgtttatcgaattggatttgtagggtttatgggggttgattttttttttttaggaattgtatttgaaatagtttgaggtgtttttcgaatttgtatttttttttttatatatggtttatcgggtttgataatttttgtgtttcggttgcgggattttttttttgtttgggtcgttttttttcgtgttatttgattcgagtcgtttgttgtatatattgtaattttattttgtataaattttaggtaattgagttgggaggttttagagttggagaatgtttgttggacgtagttaaagttgttttgagggttgtttttgtttatatttgataaataaaagttaaagttatgaattttattgaggggattatttttgggaattttgataagtttttggagtttttggaattgaattgaaggtcgaaaagaaattaaatttttgtggttttggtaagtttggagcgtttggatcgtcgattcggtgagttttatatgtagtacggtgatgttgttttgttttagtcgttcgtattagagtttatagcgttgtttcgcgatttttttattttcgatattttaaatttttagaggtgtcgtcgtcgttagtttagttttagtttttattgcggtcgtagttatttgggtttttgtagtcgtcgttattgttagggttatttcgttgttggcgtattgttatatattgcgcggagttagatttcggattgttatcgtcgttatttgttttattttttggtttcgcgtttcgttttaggttagttttattggtttagtttttttagaatcgtttttatcggtcgttttttatttttacgggggcggggtttaaagtcgttggagttttgtttttgggattggacgttcgagaggtaagagagttattataaggttttttaatttttatgttttttttagtggatttttaggttattgtggtttgtattattaggttatttataaaaatgaatatttttttaaattaggttattttatagtaaattacggtttttgattattattatgttttgaataaagattatgagtaattgtatttgaatgttgttgaattttattgattgaattttgaattgtttgattttgattaggttggtttgtggaaagtgttattaagaagagttttttagttcgttggtattatttttttgatagttattataaaagtttttttgatgtatttttttaagaattttaaatttttatatgtagttattttttgtatattaaatggtttttttatggttaggataataaaaatatgaagaaagtatataagattttaattaatttgacgttgtgaattgtgaattttgaattgaaattaagtaagttttttatgattaggttttaaggttttggttagttttttaaaattgagaggttgaaattttttgattaaaattaatatatttgttttttttttttagtttttggaaattattattttaattttgtttttataaaatagtaaattattttagagtttatatataagtgagattatgtagtatttatcgtgggtttattttaaggttttgagtaaattattatttttttgtgttagggtattttgagttagttttgttataaattattttgtttaggtaatatattgtaaaacgttttataatttaatggttttttttttagaaaaaaagtagtgaaagttttaatagttaaaaagtgtttaatttaattgatttttgggaaaaaatattcgtataattttagatagttttaatttttgaaggtaatatagtttggtttttgttgataaataaataaaaataaaaaaattatatatatatatatataaattagttttttgtttttaagtgtgtaagaatgttagtatttaaaatttttaagatatataaaaattaaatagaattgtttaagtttttaaagggagtttggaaatttgaagaaagtaaagttaaaaatattgttttatgagttatataattatttttttttttattttttatagttttttttttatttattatttaggtaattttgtatttaaatttaataatttaatattttatttgttataagaatacgttattatgttattttaagtttttttgggtaaattatatataattagataggttgggttagggttgtttataagattttagtttagagtgtggtgtagtagtttattttttttaggatttttgttgtaataggatatgggagaagggaaatattaacgttagtagaatgggaggaattagattatggagatatgatttttgttttttggtatttttttagttgatttagaagaggatatagagggagatagatatatggttatttttataattataaattttgttatatgttgagaggatggttttttaaagttagttagtgtataagtagtggaggttgggattgttttattttttttgtttagggttatatagtttggtagatttggaaagatttttttgagaaagtgattttggaattgatattttagtggaaataattaggtattgggagggggtgaggtgaggagaaggttaagaatttttatgtagagggaattttgtgtagagattttagttaggaagaggttttgtatagtggaggaattgaaagttaatagttaggttatagtatagagtaaatgatgttggggtgtgaggtgatgttaaaaggtagatattagggttagagggcgtataattttgtaggtcgtgttaatgattttgttttttatttaagaatgttattttaggagattagttaaaaggttagggtgatggtgacggtggaaatatagaaaaaggaatttatttaagaggtatttaaaaagaagtgaaatagagatgagttggagatagattggataaaaagagtgagggagagggaggtgttaggttgtagtttaggttttgagttgttaaagaggagtttttttttttaggtgagttaaggtttagaattacgatttttggttatttttttttatttttagtgtgagaagtggcgagttggttgtttaggtatatattgttattttatatttattgtttaagatagaggcgtatatttggaaagtgaatgagttaggagttagaggagaaggtatgtcggtagaggttagggcggagaggaggaagagagtttgggggcgcgtttttaaaaaggagttagggaagatagagtagaggtcggggaggggagagtaaggattatgataggaggaaagagaggttagggaatattgaggtggaggaattttgggatatgatagttgtaaagaattgtagttaatttaatttagtttttttaatgtgtaattgaggaaattaatttttatgcgtttattttattgtaaatgtggtatttgtatttgagaaattttggaaaatataaagatgtaaagtaaattaagattatttatagtttttttatttagagatatgtattgttaaagtaaggattttgatttttttttttttttgtatttttattatggttggaattgtaatatagacgtaattttatgttttgtttttaaaatataaataatggttgtaaagcgttttatacgttgatttaaagttttttttgaaataggaaattgagatacgtcggttgtgaaatttattgaagtgagcggcggcgttaggatttttgggatttcgatttttttgtagttcgtatagttaagggcgagggcgtttttcggtagaagtagtaaatcgtcggtaagtttagcgaggagggttgtcggggtttgggtttgggaattggttggtatttagcggaaagggacgtgagttgagcggcgggggagaagagtgcgtaggttagaaggcggcgcgtagcggcgtttcgcgaggtttttacgtcgggcgatatggggtgtttgttgtttttgttgttttgggcgtttttttaggtttggggaagcgttgaaggtgggtggaacgagggcgtttgagtgtattcgcgggagggcggagagagggagttgggtagggacggggagggtaacgtttgatggggattggtgagattcgggacgtattggcgcgatttaggtagaaaattcgttgttttttggtttcggggagaggtagcgcggtatagagttcgttggtattagtcgttttttgaagtttatttttttttgttttttttttttttttttttatgttggttgttttttcggttatttgttacgcgtttttaatttttatttttttttagt

SEQ ID NO: 12 - DNA, 5525 bp, Artificial Sequence
  chemically treated genomic DNA (Homo sapiens)
attgggagagaatgaagattggaggcgcgtagtaagtggtcgggagagtagttagtataaagagaaggaagaaagaaataagaggagatgagttttaggaggcggttgatgttagcgaattttgtgtcgcgttgttttttttcggagttagggagtagcgagttttttatttagatcgcgttagtgcgtttcgggttttattagtttttattaggcgttgtttttttcgtttttatttagtttttttttttcgttttttcgcgagtgtatttaagcgttttcgttttatttatttttagcgtttttttaagtttggaggagcgtttagagtagtagaaatagtaggtattttatatcgttcggcgtggggatttcgcggagcgtcgttgcgcgtcgttttttgatttgcgtatttttttttttcgtcgtttagtttacgttttttttcgttgggtgttagttaatttttaagtttagatttcggtagtttttttcgttgggtttgtcggcggtttgttgtttttgtcgaagggcgttttcgtttttagttgtgcgagttgtaaagaggtcggggttttaggaattttggcgtcgtcgtttattttagtaggttttataatcggcgtgttttaattttttgttttaaaggagattttgggttaacgtgtgggacgttttataattattatttatgttttggaagtaggatataaggttgcgtttgtgttataattttaattatggtaaaaatgtaaagggaaaaaaggattaaagtttttgttttagtagtatatgtttttaggtggaaagattatgagtgattttaatttgttttatatttttatgttttttaaaattttttaagtgtaagtattatatttataataaagtaaacgtatgaaaattaatttttttagttgtatattgagagaattggattaggttggttataattttttataattgttatattttaggatttttttattttagtgttttttagtttttttttttttttgttatggtttttgttttttttttttcggtttttgttttgttttttttgatttttttttggggacgcgtttttagattttttttttttttttcgttttagtttttgtcggtatatttttttttttggtttttgatttatttattttttaaatatgcgtttttgttttaaataataagtgtaagatgatagtgtgtatttggatagttaattcgttattttttatattgaaaataagaaaaagtgattaaaaatcgtggttttaagttttagtttatttggaggaaaagatttttttttggtaatttagaatttgggttgtagtttgatattttttttttttttattttttttatttaatttatttttaatttatttttattttatttttttttgaatattttttgaataaatttttttttttatatttttatcgttattattattttaattttttgattgattttttgaagtagtatttttgggtagaaaataaaattattagtacggtttgtaagattatgcgttttttagttttggtgtttattttttgatattattttatattttagtattatttgttttgtattgtagtttggttgttagtttttagtttttttattatgtaaaatttttttttgattaaggtttttgtataaagttttttttatatgaaagtttttgattttttttttattttatttttttttaatgtttagttatttttattaaggtattagttttaaggttatttttttagggaagtttttttagatttgttagattgtgtgattttaggtaggagaagtagggtagttttaatttttattgtttgtatattaattggttttgagaagttatttttttagtatgtagtagagtttataattatagaaatggttatatgtttgtttttttttgtgtttttttttaaattagttggagaggtgttagaaggtaaggattatgtttttataatttgattttttttattttgttaacgttaatgtttttttttttttatattttgttgtagtaagagttttagagaaaataggttattgtattatattttaggttgggattttgtagatagttttaatttagtttatttaattatgtgtaatttgtttaaaaaagtttaaaataatatagtaacgtgtttttgtaataaataaggtgttaaattattaaatttggatataaaattgtttaaataatggataggagggaaattatgagaaataaaaagaaaaataattatatgatttatggggtaatatttttaattttattttttttaaatttttaagttttttttaaaaatttgaatagttttgtttagtttttgtgtattttaaaaattttaagtgttaatatttttgtatatttaaagataagaagttggtttgtgtgtgtgtgtgtgtggtttttttgtttttgtttgtttattaatagaggttaggttatattatttttagaagttaggattatttggaattatacggatatttttttttaaaggttagttgagttagatattttttggttattggaatttttattgttttttttttgggaaaggaattattgaattatgaaacgttttgtaatatgttatttaaataaaatagtttataataagattgatttagaatattttagtatagagagatggtgatttatttagagttttaaaataagtttacggtgggtattatatgattttatttatatgtggattttaaaatagtttattattttatggaaatagagttagggtagtggtttttaggagttggagggaaggggtaaatgtgttaattttggttaaagggttttagttttttaattttgagaggttgattaaaattttggagtttgattataagggatttatttggttttagtttagaatttataatttataacgttaaattagttggaattttatatgttttttttatgtttttgttattttaattataaggagattatttaatgtataaaggatagttgtatatgagaatttaagatttttgagaggatatattagggaaatttttataatagttattaggaggataatattaacgaattaaagaattttttttaatagtattttttataagttaatttgattaaaattaaataatttaaagtttagttaataaagtttaatagtatttaagtgtaattgtttatagtttttatttagagtataatggtgattaaggatcgtagtttgttgtaaaatggtttgatttaaagaggtatttatttttgtaagtagtttgataatataaattatagtaatttggagatttattaaaagaaatataaggattagaaaattttgtgatagtttttttatttttcggacgtttagttttaggagtaaaattttagcgattttgggtttcgttttcgtgaaagtggaaggcggtcgatgaggacggttttgagggaattagattaatgagattagtttggggcggggcgcggggttagagggtggggtaggtggcggcgatggtagttcgaggtttggtttcgcgtagtatatgatagtacgttagtagcgggatggttttagtagtggcggcggttgtagaagtttaagtagttgcggtcgtagtggaggttggagttggattggcggcggcggtatttttgggagtttaagatgtcgggggtgggggggtcgcggggtagcgttatgggttttagtgcggacggttggggtaggataatattatcgtattgtatgtgaagtttatcgagtcggcgatttaggcgttttagatttattagagttataagaatttaattttttttcgatttttaatttagttttaaagattttaggagtttgttaaaatttttaaaaatgatttttttaatgaagtttataattttaatttttatttgttaaatgtgggtaaagataatttttagggtagttttgattgcgtttagtaaatattttttagttttggagttttttagtttaattgtttgggatttatataagataaaattatagtgtgtgtaataaacgattcggattagatgatacgagaaagaacgatttaggtagaggaggaatttcgtaatcgaagtatagaagttattaaattcggtggattatatgtagggaaaagagtgtaaattcggaaagtattttaagttgttttagatatagtttttgagaggaaaaggttaatttttatgaattttgtaaatttaattcgatagatatatagtagtagtagcgttttttagaagttatatagggatagggtggtttatttattggttttgaaggtttataagaaatcggagttatttgttagattttagaaagatggtgttaattaaaaagataggaattttttgggagtaattttgtaataggtagttaatttgaattttaaggatttttcgtatattttaaaggattatgtttttaaagagttttagagagattggtttggatatagtgaaatagatatttggttattggagttaatgttttttagaaaattaaatttattttagaatgttgtaggtattagtcgtttagaatttttagtatgttttagtagaaacgttgtattttttttttagatacggtttttggatttagagtttattgattatttaatggataaaaaagttcgaatattttatttgacgagtagagtattattaatattaaatggttatttgaattttattagtgaaaaatttgttgtaggtttttttttgttttttgtagttgttgttatttttatttttttatcgtttgtttttaatttatttgtcggttttatattttttttagattgtaaattttaattttaatttttttagtattttagaaggtcgggggtttaagatttatttgttgatagttttagttaaaataatagtatttatgagaattaataagataagtatatttttaggatttttttggaaattttattttttggtttagttttattaaagtgtttaaagtttatggaagaaaattatttagtgttttataaaaagtttaaaaagaagtttaaaaaatataaggaaaaggattaaataaaaaagtacgatattgagattattgaggaaaaggagaaagattttaagagagaagaggaaattgttaagttaaataattttagtttaaattttagtggaggagttaaagaggattgtattgtttttatggaatttttagtaattgaatttttagattatttgataaaatatattgttattattttttatgagtaacgtcggaattataaagatgacgttagtgtagagtatgatgagtatagagttttgtatgttaggatggagattgtagttagaagatttattaaattagatgtataaagaaagcgtttttttttaggtttaaaagagtattagaatgtttatgaagaagttttataagaatatcggaagataaagtagtttagttttaattattatgaagaaaaat

SEQ ID NO: 13 - DNA, 5659 bp, Artificial Sequence
  chemically treated genomic DNA (Homo sapiens)
taatgattatttttagtgtttagttttttttttaagtaaaatatataattaatgttaggtaagttttttttaatggttttttagagagttaaacgtttttatgttgagttggaaatattgatgtttttttttttttgagatagagttttattttgttgtttaggttggagtatagtagtacgatttcggtttattataatttttgtttttcgggtttaagtgatttttttattttagttttttaagtagttgggattataggtatgtattattatgtttagttaatttttgtagttttagtagagatagggttttattatgttggttgggttggttttaatttttgattttaggtgatttgtttattttagttttttaaagtgttgggattataggtacggtggtgttcgattgatttttttttttttttttttttttttttttttttgagacggagtttcgttttgtcgtttaggttggagtgtagtggtgtaattttagtttattgtaagtttttttttttaggtttatgttatttttttgttttagttttttgagtagttgagattataggtattcgttattatatttagttaatttttttgtatttttagtagagacggggttttatcgtgttagttaggatggttttaattttttgatttcgtgattcgtatattttcgttttttaaagtgttgggattataggcgtgagttattacgtttggttcgattttttttttaaatgttggtttttttggttttaatattttgttattattttgataattaagaaatatgtttttgttttaaataataaagattaagagattatttgttttaggtaaatagaaaaatttttattattttttttaatgtgtttagtaaaattataaaggtaattatgttttggggaattaattattttatatagtatgaagtaaataaagttattttgtttaataaattaaataatattagttagttgaggggtataaagaatgaattaattttttttttttgttttattaattttttaagttttatttttaagtatttttgatttaaagataagattgtttttttttgattatttaatttttattatgtttattattaaagttaaagtagatgtaataagttttaatattattgaatttaatattttaattaatagaaatatagattatatttaggttgggtgtagtggtttacgtttgtaattttagtattttgggaggtagaagtgggtggattttttaggtttaggagtttgagattagtttgggtaatatagtaaaatttcgtttttattaaaaattgaaaaaaattagttgggtatggtggtacgtgtttgtagttttagttacgagaaaggttgaggtgggaggattatttgagtttagggaggttaagtttgtagtgagtcgtgatcgtattattgtattttagtttgggtaatagaatgattttgttttaaaggaaaaaaaagaaagaaagaaaagaaatgtagattacgttttagtagtttgggtgaaagttatgaaaataatttacgggaaaaaataattagtttgtgaaataatttttgtaatataattaagagttagtgagaggaggtgatagttaattaagtatgtgaaatgaaatgttttgtagttagttatatttttaggagggttatttttagtttatgtagtttttataagttgttttaatgttataaaaatattatttttatcgagtttatattatttttttggagattgaagagatatttaaattaaatttttgagtttttttttttagtttatttaagttaatttataaaaatataggggaaagaatatagttttaaaaaattaaaacggaaaataaaaaatgtagaaattatagtatgaagttaagagtttaaataagtttataatattaaagatattttatgagtaaaataagaaaattaagtagtaattatttagtttattgattatggttttttttggaatgtagtgaaagatttagttttgttttttgtatttattataggtgttaagagtttaaggagggtttaagattaagggaagttaaatattgttagggaaagtaaatatatgtttaaattattatttttaaataagtttattatttataatttaaaattattaatttttatgtggtttttgtaagtattttttaattttatttttaaataaagagaaattattacggaagtattttttttagaagataatttataattattatttaattcgatttttttttttttttttttttggaaattttggtatatggatttgttattattgttaagaattatttagggttaggcgcggtggtttacgtttgtaattttagaagtttgggaggtcgaggtaggtggattatttgaggttaggagtttaagattagtttggttaatatggtgaaatttcgtttttattaaaaatataaaaattagtcgggtatggtggcgggtatttgtaattttagttatttgggaggttgaggtaggagaattatttgaatacgggaggcggaggttgtagtgagttaagatggtattattgtattttattcgtggtgatagagcgagatttcgttttaaaaaaaaaaaaaaaaaaaagagagacggagttttagttttgttgtttaggatggtatgtagtaatacgatttttgtttacggtaatttttgttttttgggtttaagtgatttttttgttttagttttttgagtagttgggattataggtatatattattgtgtttagttattttttgtatttttagtagagacggggttttatcgtgttggttaggttggtttcgaatttttgattttaggtgatttatttgtttaggttttttaaaatgttgggattataggtgtggtgagttattgcgtttagtttttttttttattttggggaatattttattttgtttatggagtagttgttgttttattattttatttttttaataaatttgtttatattttgtattgcgattcgttttgaattttttttgtatgagatttaagaatttttttttgtggtttggattgggattttttttttgtaataaatgtattggttgataggagaataaagaaaaaaaaagaggaaaaattagagtaatttttttatataattatattatatgatcgttttgttaattatgataatagttaataaaataatttttttatgtttaatttttagtttatgtttgtatgttttaaaatgttttttatagttggtttgtttaattatttaatgaaggattaaatattgtagttggttgttatgtatttagttttttaattttgatttttagattatttttagtttattttattatattcgttttaagttttttgagttagttaattttaatttgttatgtattttataaaatgttttttttttttttatagtcgattgtttttttgtttttggagtttttttttttattttttaaggttattttgagtatatttttttgtttcgtgaaatttatttttttttttttttttttttttttgagtttaattagttgttatcgtaggtttttgtttttttttatagtgtggttagaattcggttttgtttgttagtagagggtagggtcgttgtttttttttttttgtagtttttaagtttagtatatgtttggtatttagtggtagtataataaggaatttgatgaatattttttttttttgtttttcgttttttttttatagtttgttagttatggttaggaagagtaagattcggaatgggtttggtgtgtttcgcgggaaggtcgtgattttggaagatgttttttagtttagttcggattttttttttttagttttagagattttttttattttttgtgtatatatatatattaagatttaggaagtggtttttgaggtaggattttaagagtttaaggagtggggtcgaggttggaggtgtgggggtgtgacggtcggttttatttttcggtttgtttagattagttttttttggggattatttttggtatataagggagggaggtagtttgatttttttagttcgtttttagtttttatttggttttgttttttgggataagacggggaaatttagaggatgtaagttttttttgttttcgtgtttttttttaagttttcgttattatagacggatgtaggagttgtttgggaggttggaagtatagattttgttaatttttttttagagggcgggattcgacgcggacgtgttttgattgattgggtagcgtggtttcggggaagggtttttttttttttttttagattaggatttttggaaaatggagaagttgtgttaatagaggggggttagaaatttttattttagaatgttgtagaatgttgggagatatttaggatgtgagttagggattttttggaagtgtttgttttggttttattcgattttaggtagtttttagttgtttgtatagtcggatggggagggggtttgtatagagttggagttagaggagagagttggtttattttttacggtaggatggggaaattttatagattatattgttattcggttttagtttttcgtttcggcgtttagagggtaatttttatttatttcgttcgtttttttgaattagagtgatttaggttgcgtttcgtttcgtttttttatttcgagttggtacggaggtatagcgttagaggggggttttaggcgtttcgaggttttgtttttgcggttttttttttgcgggggtgggcgttttttttcgggtaggggttacgtggttttggtcgggcggggggttcggtttatttcgcgtcgggtttagtgatttaggtcgtagttgttatcgcgttatatgagggaggtcggcggttattcggcgggggaggggatcgtggttggagttcggggcggggtcgcgcggtaggcggggcgggagtcggggggcgtagttagagagtttcggagtcgcggcgggagaggaacgcgtagttagttttgggaagtttaggtgaggtcgcggggattcggcggatttcggcgcgggttgggagagattattcgtagtttttttttttagggttcgttttaggttcgcggagattcgttcggcgttttttagtcgttttggagtaattttgtttcgaagttttttgggttcgggtagggtgtggcgggggtgttggttgtattttttttttttttggtgggcggggaggttagagtttaggggaaaggggttggggcgggggtcggggttgggttgaagatcgtttttttaggttgggtgttgggtggggaaagggtgtttgacgttcggagattggcgggtcgagggtcggcgttaggtttaagtttttgtcggcgtttttggatttgttttgggttttagaggcggcggggcggggttcgggtttcgcggtcgtcgtttttattttttttttgcgggtaaagagggggttgggagacgtggattcgatcgcgggttttcgggtgggaggggtcgggaatcggggtcgtgaagggaagttttcgagggtcggtcgggagttcggaaatcgaggttttttttcggttagttttaattttttcgtttttttttttgttttagg

SEQ ID NO: 14 - DNA, 5659 bp, Artificial Sequence
  chemically treated genomic DNA (Homo sapiens)
tttggggtagaggggagggcggggggattaaaattggtcgaagggggatttcggttttcgggttttcggtcggttttcgagggtttttttttacggtttcgattttcggttttttttattcggaaattcgcggtcggatttacgttttttagttttttttttattcgtaggagaggggtgggggcgacggtcgcgaagttcggatttcgtttcgtcgtttttggggtttaggatagatttaagggcgtcggtaggggtttgagtttgacgtcgattttcggttcgttagttttcgggcgttaaatattttttttttatttaatatttagtttggagaaacggtttttagtttaatttcgattttcgttttagttttttttttttgggttttgattttttcgtttattaaaaaaaaaaaaagtgtagttagtattttcgttatattttgttcgggtttagggaatttcgaagtaaagttgttttagggcggttggagagcgtcggacgagttttcgcgggtttggggcgagttttggaggaagggattgcgggtggttttttttagttcgcgtcgaagttcgtcgggttttcgcggttttatttgggttttttaaggttggttgcgcgtttttttttcgtcgcggtttcggggttttttagttgcgtttttcggttttcgtttcgtttgtcgcgcggtttcgtttcgggttttagttacggttttttttttcgtcgagtggtcgtcggttttttttatgtgacgcggtaatagttgcggtttgagttattgggttcggcgcggggtgggtcgagtttttcgttcggttagggttacgtggtttttattcggaagaaggcgtttattttcgtaaagggaaagtcgtaagggtaagatttcggggcgtttggggtttttttttggcgttatattttcgtgttaattcggggtaggagagcggggcggagcgtagtttgggttattttggtttagagaagcggacgaggtgggtgagagttattttttgagcgtcggggcggagagttgaggtcgggtgataatgtggtttgtgaggtttttttattttatcgtaggggatgagttagtttttttttttggttttaattttgtgtaagttttttttttattcgattgtgtagatagttggggattgtttggggtcgggtggggttagaataaatatttttagaaagtttttggtttatattttgggtgttttttaatattttatagtattttagagtggggatttttggtttttttttattagtatagtttttttattttttagggattttagtttgagaaaaggggaggaagttttttttcgaagttacgttatttagttaattaagatacgttcgcgtcgggtttcgttttttgggggaggattgataaggtttgtgtttttagttttttagatagtttttgtattcgtttgtgatagcgagggtttgggggaagatacgaaggtaggagaggtttatattttttggattttttcgttttattttagaagataaagttaggtgagggttggaagcgggttagggggattaagttgttttttttttttgtgtgttaggggtggtttttagaaggagttgatttgaataggtcggagagtaggatcggtcgttatatttttatatttttagtttcggttttattttttgggtttttaaggttttgttttaagaattattttttgagttttagtgtatgtgtgtatataaagaatgaaagaagtttttagagttaaaggaaggagattcgggttgggttgagaagtattttttaggattacggttttttcgcgggatatattaagtttatttcggattttgttttttttgattatggttggtaggttgtggaggaggagcggagagtagaagaaaggagtatttattaggttttttattgtgttgttattagatgttaggtatgtgttaggtttgggggttgtaaggagaggaagatagcggttttgttttttgttagtaggtagaatcgagttttggttatattgtgaagaaaggtagaagtttgcggtggtagttggttaagtttagagggagggaaagggagaggagaatggattttacggagtagaaggatgtgtttaaggtgattttggagaataaaggggagagttttagggatagagaagtagtcgattgtggaaaaaaaaggagtattttgtaaagtatatggtaggttggggttggttggtttaaagggtttgggacggatgtggtgagatgggttgaaggtggtttgaagattaagattgagagattagatatataataattaattgtaatgtttggttttttattgaatggttgaataaattagttgtgaaagatattttgggatatatagatatggattgagaattagatataagaaaattattttgttaattgttattatggttaataaaacggttatataatatgattatgtagagaagttattttagttttttttttttttttttttttatttttttattagttaatgtatttgttataggaaaggggttttaatttagattataagagagggtttttggattttatgtaagaaagatttagggcgagtcgtagtgtaaagtataagtaagtttattaagaaagtaaagtggtgaaataatagttgttttatagatagagtaggatgttttttaaagtaagaggaggggttaggcgtagtggtttattatatttgtaattttagtattttgggaggtttaggtaggtggattatttgaggttaggagttcgagattagtttggttaatacggtgaaatttcgtttttattaaaaatataaaaagtagttgggtataatgatgtgtgtttgtagttttagttatttaggaggttgaggtaggagaattatttgaatttaggaggtagaggttgtcgtgagtagaaatcgtgttgttgtatgttattttgggtaataagattgaaatttcgttttttttttttttttttttttttttgagacggagtttcgttttgttattacgggtggagtgtagtggtgttattttggtttattgtaattttcgtttttcgtgtttaagtgatttttttgttttagttttttaagtagttgggattataggtgttcgttattatgttcggttaatttttgtatttttagtagagacggggttttattatgttggttaggttggttttgaatttttgattttaggtgatttatttgtttcggttttttaaatttttaggattataggcgtgagttatcgcgtttggttttaaataatttttaataatagtagtaagtttatgtattaaggtttttaagaaagaggagggaagagaatcgagttgggtagtagttataggttgttttttgaaaaaggtgttttcgtgatagtttttttttgtttggagatagagttaagaaatatttgtagagattatatgagaattaatgattttggattgtgaatggtagatttgtttggaggtgatgatttagatatgtgtttgttttttttggtagtgtttggttttttttgattttaagttttttttaggtttttgatatttgtgataaatgtaggaggtagggttgaattttttattgtattttagaggaggttataattagtggattggatggttgttgtttagtttttttattttgtttatagggtgtttttgatgttataggtttatttgaatttttagttttatattatagtttttgtattttttgtttttcgttttgattttttaaaattatgtttttttttttatgtttttataggttaatttggataagttgaaggaaagagtttaaagatttggtttgaatgtttttttaatttttagaaaggtaatgtaggttcgatggaagtaatgtttttgtgatattagagtagtttatgggaattatataggttggaaatgatttttttgagaatgtagttggttataaagtattttattttatatatttgattgattgttatttttttttattgatttttgattatgttataggaattattttataagttgattgttttttttcgtggattgtttttatagtttttatttaggttgttagagcgtggtttatattttttttttttttttttttttttttttttgagataaggttattttgttgtttaggttggagtgtagtggtgcgattacggtttattgtaggtttgatttttttgggtttaggtgatttttttattttagtttttttcgtagttaaaattataggtacgtgttattatgtttagttaattttttttaatttttggtagagacgggattttgttatgttatttaagttggttttaaatttttgggtttaagggatttatttatttttgttttttagagtgttgggattataggcgtgagttattgtatttagtttgagtatggtttatatttttgttggttaagatgttaaatttagtgatgttaaaatttattatatttattttaattttgataataggtataatgggaattaaataattaggagaagatagttttgtttttaggttagaagtatttagaaataaaatttggaggattggtggaataaaaaaaaaaagttaatttattttttatgttttttagttaattgatattatttagtttattaagtaagatgattttgtttattttatgttatgtggggtgattggttttttagggtatagttgtttttgtagttttgttaggtatattggagaaaatgataaggatttttttatttgtttagagtaggtggttttttaatttttgttgtttagaataagaatatgttttttggttgttaaagtggtggtagggtattaaaattagaaaaattagtatttaagaaaaaaatcgggttaggcgtggtggtttacgtttgtaattttagtattttgggaggcggagatgtgcggattacgaggttaggagattgagattattttggttaatacggtgaaatttcgtttttattaaaaatataaaaaaattagttgggtgtggtggcgggtgtttgtagttttagttatttaggaggttgaggtaggagaatggtatgaatttgggagggggagtttgtagtgagttgagattgtattattgtattttagtttgggcgatagagcgagatttcgttttaagaaaaaaaaaaaaaagaaagaaagaaaaaaattagtcgagtattatcgtgtttgtaattttagtattttgggaggttgaggtgggtagattatttgaggttaggagttgagattagtttagttaatatggtgaaattttgtttttattaaaattataaaaattagttgggtatggtggtatatgtttgtaattttagttatttggggggttgaggtgggagaattatttgaattcggaaggtagaggttgtagtgagtcgagatcgtgttattatattttagtttgggtaatagagtgagattttgttttaaaaaaagaaaaatattagtatttttaatttagtatgaaagcgtttagttttttagaaagttattggaagaaatttatttgatattggttatatattttgtttgggaaaaaaattaaatattaaaagtaattatta

SEQ ID NO: 15 - DNA, 6621 bp, Artificial Sequence
  chemically treated genomic DNA (Homo sapiens)
tttgtatttttagtagagatggggttttttttttttttttttttttttttttgagagggagtttcgtattgttatttaggttggagtgtagtagtgttatttttatttattttaattatcgttttttaggtttaagtaatttttttgttttagttttttaagtagttgggattataggtgtttattattacgtattattaattttttgtatttttagtagagatggggttttattatgttagttaggttggttttgaatttttgattttatgatttatttatttcggttttttaaagtgttgggattataggcgtgagttattatgttcggttaagatggtgttttatcgtgttggttaggttggttttgaatttttgatttcggttttttaaagtgtcgggattataggtgtgagttattgtgttcggttaggagttttattgtgaagggaaggaatgaatatagttggaggggaaagtggtattaaggaaaggttttttattattaataataaatattttattgaaatatattatttatatagaatagttaataaattttgagtgtgtagtttaatgaatttttataaggtgaatatatttaggtaattagtatttagattaagaaatggaaagtggttaggtgtagtggtttatgtatataatgttaatattttgggagtttaagacgggaggatcgtttgagttcgagagtttgagattagtttgggtattatagttagattttcgtttttaaaattatatatatatttttttttgagatagagttttgttttgttgtttaggttggagtgtaatggtatgattttagtttattgtaattttcgttttttgggtttaagtgattttattgttttagttttttaagtagttgggattataggcgtgtgttattatattcggttaattttttgtatttttagtagagacggagttttgttatgttggttatattggtttcgaatttttgattttatgatttatttatttcggttttttaaggtgttgggattataggcgtgagttattatgtttagttaaaataaaaaataaaatttttaattagttaggtttatgggtgtatgtttgtagtttaggttatttaggaagttgaggtgggaggattatttgaatttagaagttcgaggttatagtgagttatgattatgttattgtattttaatttgggttatagagtaagattttgttttaaaaagtgaaaaataaataagaaatagaatatgattagttgttaatattttttttatggttttttgtagttattattatttttttgaaaggtaattagtattataattaattttttttttttttgagacggagtttcgttttgttatttaggttggagtgtagtggtttaatttcggtttattgtaatttttattttttgggtttaagtaatttttatgttttagtttttatagtagttgggattatagttgtgtattattatatatggttaatttttgtgtatgtatatatgtgtgtatatatatgtttgtgtatattatatgtgtgtatatatgtatattatatatgtgtgtatatatgtatatatatatatatatgtatatgtatatatatatatatatgtatatgtatatatatatatatatgtatatgtatgtatatatatatatgtatattatgtatatatatatatgtatgtatattatgtatatatatatatatatatgtgtgtgtgtgtatatatatatatatttttttttagtagagatgaggttttattatgttggttaggttggtttcgaatttttggttttaagtgattcgtttgttttagttttttaaagtgttgggattataggtgtgagttagatttaaatagtatgttttttttgtgtttttttttttatgtttgatagttgatgtgagatttatttttattgtgggtagcgtttttgttttttttattattgtataaaataattttgttttatttatttattttattgttgatgggtattagggttgttttttgtttggagttaaaatgattaatatggttatgaatatttgtgtatatgtattttggtatatttgaattgtattgtagtttttgtgttaatttttttttttttatggttttttgtggttattttttcgtttttttatatgatttttatagttgtttgtgattttattttggttatttttagtgatttttttgggtgtatttttgaattatggattcggttatttttttgtggtttttattttagttttagttttgcggttttgttttattatattaagtttttaatgttggtgttttttagatttagggttttaaaaattttttgtatatttttaatgggtattattatttttatgttaattaatattaaatttgttttttgattatattttttagttagtttattagtataaaattgagtttattaaatttttttaagaagtatgtttttaattgttgaaatgttatatttatttaggtatttgaattattatttaagaattattttagtttttttttttttttttagttttttataattttaatttttaattattaaaatttgatgagatttattttttttagggtttatagaattattttttttttttgtttttaaggtttttattttgttttagaattttttagatttttgagatagttattttttttttttttaggtttttttatttttttttattgatttattttaaagtaaatttgattcggttattatatattttttattgtttataggataaggttaaattttttagtaaattttaatttttttaagaattgttttttatagttagttttatgtgtttattttagaatcgattggattaatttaggagtagttttcggtaagtacggcgtttttttttattttttggttgtcgagggtcgtttttttagaaagtattttttattagttttaagttttttttttttagtaattttgatttttagttttaattttttttaggacgtgttttttatcgtattgttttttttagttttcgttttttttttaggtgtttattatttttttataaattatagttattgttatggtaataattttattattagaaggagttttatgtttagcggattagagttttttgagagtagggattgtggtattattttaagtattgaatttgttttagtaatttttaaataaatatatgttgaatgaatgaatgtagtaataggaatgttgagttaagttttgtttttgttttttgagacggagtttcgttttgttgtttaggttggagtgtagtggttcggttttggtttattgtaagtttcgtttttcgagtttagttatttttttgttttagtttttcgagtagttgggattataggcgttcgttattacgttcggtaattttttgtatttttagtagagtcgggttttattatgttagttaggatggtttcgattttttgatttcgtgattcgttcgtttcggttttttaaagtgttgggattataggcgtgagttatcgttttcggtttgttgagttaagtattaaattatataaaatataggaggagaggaaagtatttagagatacgatagggagaattatttgaaatagtgggattatagattatgtgaattgtgtagagaggtttaaatagtttggggtttttggagggaagggaggtttttgggtggtggagtattggtgtatagaaaaggagatgaattttgagagagaggttttttattgtgaagggtttggtgttggggttaaaggtttggggtttttatttgtttagtatggttttttaaattgtagggttttttttttttgagtggggggtagggggtgttttattttgttgtttaggttggttttaaattcgtgggtttaggtaatttttttatttcgtttttttaaagtgttgggatgataggcgtgagttattaagtttagtagtaggttgtaattaaattatgtatttatggtttttaaaattcgtttaggagttgttataggttcggcgttgtaaaagtaaatatgtttatttagaaaatggggataatttttatgttatagagttgtaaagattaaatgaattaatatagattaatatattgggaatagtgttaagtgtataagtattatgtaaattttagttattatttgttattattgtgtttgttgttatttttttttaggagtttttagggggttaagaagtggtgggaaagaaagaaatgattttaagagtatttaataagggttagaatggaagtgagtaaaaaatgttgaggtttatagtataggttgtattgcggggtttaaattttatgaggttagtagtatttagggtttgtgagttttttagagttgggttttggtggtcgagtttagttttgggggttattgtatttttttttttattataaaatggggtttggaggttcggggcggaagaaaggggtttataatattgtacggttagaggtcgagttaaggttggattcggttagatttttataggttttttttagtttttatattgttttagagtgtggggcgttcggttgggggcgaggtagcggaggtttaaagggggtcgaagttaattggacggtagttcgcgatgggaattacgttttttagtatgcgacggggtaaaggggttttttagtcgcgagtagcgtttcgtaggttttgttgggagtttttattgatttttgtttttttttttattttgattttcgtttttttgttttgggtttcgtttttttttgagagtcgatgatttggtagagtttcgcgagtcgttttttttttttttttttattggtttagtttagttgttattcggttgagaggaggagaagttgtttattgattggtggatttcgtttggcgttaattaggaaaggggggcggggtagtagttggttttattgagtcgttattatcgcgaaaggtcggtttggttgcgatagtttgggtaagaggtgtaggtcggtttggttttttgttattcggagttgggtaagcgggtgggagaatagcgaagatagcgtgagtttgggtcgttgtttcgaggttttcgttcggttttttttgtcgattcgttacgtttgtttggatttaatttttaggttgtcggcgttcgttcgttcgttggtttcgcggtgtgagagggaagtattcgtgtttgtggttggtggttggcgtttggagggttcgtatattcgttcggtcgcgtcgtttgttcgcggtagtcgcgtttttgaatcgcggagtcgtgtttgtgtttgattcgcgggcgtcggtggcgcgcggtcgaggtcggtgtcggcggggcggggcggtcgcggcggaggtagaggaagagggagcgggagttttgcgaggtcgggcgtcgttatggaattgggttcggagttttcgtatcgtcgtcgtatgtttttcgtttgtagtttttttttcgcgtcgtagttcgtcgtgaaggcgttatttggcgttttagtcgtcgggggattgtcgtttgttattaatttgatcgttattatggattagttgtagggtttgggtaggtaaggagagatcggcgggcggtgtttcgggtttttggtttcggtgtcggtttcggagagattaggttaggaaacggatcgggagaagggcgagattcgttcgttcgggttcgtcgttcggggatagtcgggttagggtttgttatgtgtattttcgttcgggcggaatgttgggcgggagaggtcgtcgggattttttaggggaagaggtggagatttttgggtttaagttcgagttaggtttatttttatttttttcggattgtttcgtattttttttttatttttatttttggaagttttttggaatttattttcgcggggaaaattaggtttttttaggtatttatttttattttttgttaaattatttttaggattttcgtttgttgtgatttttgtttttttttaataaaggattatggtatttttttttttggcgtttatgtaaaattattttagtttttcgttttgtgtatatttttgatgtttattttgttgtttttttaaggttaggtttttttatttaatttttagaaagttttttgggttttttttgatagtaaaaaatgtattttacggtgtttttcgcggaagagttattttttttttaatttttggtatttcgtttgttaagtatatgttttgtgcgttttttaatttttgaaaagtagaaagtgttttgtttaatttttatttcgattttgttttagtatttagaatatatgtttttattttaggaaatattttaatatttgttatagttattataatttgtaatgtggtttaaggttatgtttatttatttttttttttttttttgtttaagtgttaattgggtgtttagagtggtaaagtgggatttttgttatttgtggtgtggtttagaaatggtttttggtagtttggttgttttttaattttatggtttattttttgtatgtgattttttaattatattttataaattatttatggtttatttttgttggttttagt

SEQ ID NO: 16 - DNA, 6621 bp, Artificial Sequence
  chemically treated genomic DNA (Homo sapiens)
attgaaattaatagaaataaattatgaatgatttataggatataattaaaaggttatatgtaggagataggttatgagattaagaagtagttaggttgttagaaattatttttaggttatattataagtggtaaagattttattttgttattttgaatatttaattagtatttgggtaaaggagaaaaaaggagtgggtgggtatggttttggattatattgtaggttatgatggttatggtaaatgttggggtattttttaaaataaaagtatgtgttttaagtattgagatagagtcgggatgaaagttgaataggatattttttgttttttagaagttgggaaacgtataagatatgtgtttagtaaacgggatgttagagattgaagggaaagtagttttttcgcgggaaatatcgtgggatgtattttttgttattaggaaaagtttaggaagttttttgaaagttgggtaaaaagatttggttttaggaaagtagtagagtggatattaggaatgtgtatagggcgagggattgagatgattttatataaacgttaggaaagaaaatgttatggttttttgttgagaaggaataaagattatagtaaacgaagattttgaggatggtttagtaaagggtgaaagtgagtgtttagaagagtttgatttttttcgcgggggtagattttaaagagtttttagggatagagatagaaggagagtacggagtaattcgaaaggggtgaaggtgggtttggttcgggtttaggtttaaggatttttatttttttttttggaaggtttcgacggtttttttcgtttaatatttcgttcgggcgggggtgtatatggtaggttttagttcggttgttttcgagcggcgaattcggacggacgggtttcgtttttttttcggttcgttttttggtttgattttttcgaggtcgatatcgaggttaggggttcggagtatcgttcgtcggtttttttttatttgtttagattttgtagttggtttatagtgacggttaggttggtgataggcgatagtttttcggcggttgaagcgttaaatagcgtttttacgacgggttgcgacgcgggaggggggttgtaggcgaagagtatgcggcggcggtgcgggggtttcgggtttagttttatggcggcgttcggtttcgtagagttttcgttttttttttttttgttttcgtcgcgatcgtttcgtttcgtcgatatcggtttcggtcgcgcgttatcggcgttcgcgggttaaatataaatacgatttcgcggtttagggacgcggttgtcgcgggtaagcggcgcggtcgggcgggtgtgcggattttttaggcgttagttattagttataggtacgggtgttttttttttatatcgcgaggttagcgggcgggcgggcgtcggtaatttgaagattaaatttaaataaacgtggcgggtcggtaagagaagtcgggcgagagtttcgaggtaacggtttaggtttacgttgttttcgttgtttttttattcgtttgtttagtttcgggtagtagaaaattaagtcgatttatattttttatttaggttgtcgtagttaggtcggtttttcgcggtaatagcggtttagtggggttagttgttgtttcgttttttttttttagttggcgttaaacggaatttattaattagtaagtaattttttttttttttaatcgaatggtagttaggttgggttaatgagaggggaagaagaaagcggttcgcgggattttgttaggttatcggtttttagaagggggcggagtttagagtagaagagcggggattaaaatgagagggggagtagaggttaatgaaaatttttagtagaatttgcgaggcgttgttcgcggttgaaaggtttttttgtttcgtcgtatgttgggaagcgtagtttttatcgcgagttgtcgtttagttagtttcggttttttttgggttttcgttatttcgtttttagtcgggcgttttatattttgaggtaatgtggaggttaaggaagatttgtggaggtttggtcggatttagttttggttcggtttttaatcgtgtagtattgtggatttttttttttcgtttcgggtttttaggttttattttataatgagggagggaatgtaatgatttttaggattggattcgattattagggtttaattttggagggtttatagattttgggtgttgttggttttatgggatttgaatttcgtagtataatttgtgttgtgggttttagtattttttgtttatttttattttagtttttattggatgtttttagaattattttttttttttttattattttttagttttttgggagtttttagagagaaataatagtaaatataataatagtaaataatagttaaagtttatataatgtttatgtatttgatattgtttttagtgtgttaatttgtattaatttatttaatttttataattttgtgatataggaattatttttattttttaagtgggtatatttatttttatagcgtcgaatttgtggtagtttttagacggattttgagggttataagtgtatgatttaattgtaatttattgttgggtttagtggtttacgtttattattttagtattttgggagggcgaggtgggaggattgtttgagtttacgaatttgagattagtttgggtaataaagtgagatattttttgttttttatttaaaaaaaaaaaattttatagtttgaaaagttatgttggataggtggaaattttaaatttttggttttaatattagattttttatagtgaggaattttttttttaggatttatttttttttttgtgtattagtgttttattatttaggaattttttttttttttagaaattttaggttatttaggtttttttgtatagtttatatggtttgtggttttattgttttaaatagttttttttgtcgtatttttgaatatttttttttttttttgtgttttatgtggtttaatatttggtttaataggtcgggagcggtggtttacgtttgtaattttagtattttgggagatcgaggcgggcggattacggggttaggagatcgagattattttggttaatatggtgaaattcggttttattaaaaatataaaaaattatcgggcgtggtggcgggcgtttgtagttttagttattcgggaggttgaggtagaagaatggttgaattcgggaggcggagtttgtagtgagttaagatcgagttattgtattttagtttgggtaatagagcgagatttcgttttaaaaaataaaaataaaatttggtttaatatttttgttattgtatttatttatttaatatatgtttatttaaggattattagaataaatttagtgtttgaaataatattataatttttgtttttagggagttttggttcgttgagtataaagttttttttaataatggaattattattatgataatagttgtggtttgtggagggatggtgggtatttagaggaggggcggggattggggaaggtagtacggtggggggtacgttttaaaggagattaaaattaaaggttaaggttgttggagaaggggagtttggggttggtgggaagtgttttttaaggaaacggttttcggtagttaggaggtgaggaggaacgtcgtatttgtcgggagttatttttgagttgatttagtcggttttagaatgggtatatgggattggttgtgagggatagtttttgaaaggattggagtttgttgaagagtttggttttattttgtggatagtggagggtgtgtgataatcggattagatttgttttagggtggattagtggaggagagtggggaggtttgaggaaaaaggaggtggttgttttaaaagtttgggagattttgaagtaaggtgggggttttggagataaaggaagggaatgattttgtgagttttgaaggaggtagattttattagattttgataattgagagttaagattgtagggggttagagggaagggaggaggttagaatgatttttaggtaatgatttaagtatttgggtggatgtaatattttaataattggaggtatattttttggaggaatttgatgagtttagttttgtgttggtggattggttggggggtgtagttaggaggtagatttggtgttgattagtatgaagatggtaatgtttattgaggatgtataaagggtttttaggattttggatttggggagtattagtattgaggatttgatgtagtgagataggatcgtaaagttggggttgagatagaaattataagggagtagtcgagtttatagtttagaggtgtatttaggagagttattgaaggtggttagaatgaggttataggtaattatggaaattatgtaggaaggcgaggaggtggttatagaaggttatgggaagggaaaagttggtatagaagttataatatagtttaagtgtgttaaaatgtatgtatataaatatttatggttatgttaattattttagttttaaatagaaagtaattttaatgtttattaataataaaatgggtaaatagaataaagttattttatatagtgatgaaaaggatagaagcgttatttatagtaggagtgaattttatattaattgttaaatataagaaggaagatataaaagagatatgttgtttaggtttggtttatatttgtaattttagtattttgggaggttgaggtaggcgaattatttgaggttaggagttcgagattagtttggttaatatagtgaaattttatttttattaaaaaaaaatatatatatatatatatatatatatatatatgtgtgtatatatatataatatatatatatgtgtatatatatataatatatatatatatgtgtatatatatatatatatatatgtatatatatatatatatatatatgtatatatatatatatatatatatgtatatatatatatatatatatatatgtaatatatatatatatatatatgtaatatatataaatatatatatatatatatatatatatatataaaaattagttatgtatggtggtgtataattgtaattttagttattatggaggttgaggtatgagaattgtttgaatttaggaggtggaggttgtagtgaatcgagattgagttattgtattttagtttgggtgatagggcgagatttcgttttaaaaaaaaaaaaagttagttatggtattagttattttttagaaagatggtggtgattgtaaggggttatgaaggggatattggtaattggttatattttgttttttatttattttttattttttgagatagagttttgttttgtggtttaggttggagtgtagtgatatgattatggtttattatagtttcgaatttttgggtttaagtgatttttttattttagttttttgagtagtttgaattataggtatgtatttataaatttagttaattaaaaattttattttttattttggttgggtatggtggtttacgtttgtaattttagtattttgggaaatcgaggtgggtggattatgaggttaggagttcgagattagtgtggttaatatggtaaaatttcgtttttattaaaaatataaaaaattagtcgggtgtggtggtatacgtttgtaattttagttatttgggagattgaggtagtagaattatttgaatttaggaggcggaggttatagtgaattgagattatgttattgtattttagtttgggtaatagagtaagattttgttttagaaaaaaatatatgtataattttagagacgggagtttaattatgatgtttaggttggttttaaattttcgagtttaagcgattttttcgttttggatttttaaagtgttagtattatatgtatgagttattgtatttggttattttttattttttgatttgggtgttggttatttgagtgtgtttattttgtggaaatttattgagttatatatttaagatttgttagttgttttgtatgaatggtgtattttaatgaaatgtttattattagtgataaaaagtttttttttgatgttatttttttttttaattatatttattttttttttttatagtaaaatttttggtcgggtatagtgatttatatttgtaatttcggtattttgggaggtcgaggttaggagtttaaaattagtttggttaatacggtgaaatattattttggtcgggtatggtggtttacgtttgtaattttagtattttgggaaatcgagatgggtggattatgaggttaggagtttaagattagtttggttaatatagtgaaattttatttttattaaaaatataaaaaattagtggtgcgtggtggtgggtatttgtaattttagttatttgggaggttgaggtaagagaattgtttgaatttgggaagcggtggttgaagtgagtggagatggtattattgtattttagtttgggtgatagtgcgagatttttttttaaaaaaaaaaaaaaaaaagaaaagaaagttttatttttattaaaaatataaa

SEQ ID NO: 17 - DNA, 5310 bp, Artificial Sequence
  chemically treated genomic DNA (Homo sapiens)
aaaaaaaaaaaaaaaaaaattagaaaattaaaaaattaggtcgggtgtagtggtttatgtttgtaattttagtattttgggaggtcgaggtgggtagattatttgaggttaggagtttaagattagtttggttaataaggtaaaattttatttttattaaaaatataaaaattagttgggcgtggtggtattcgtttgtggttttagttatttaggaggttgaggcgggagaatcgtttgaatttaggaggcggaggttgtagtgattttagatcgtattattgtattttaatttgggcgatatagcgagattttattttaaaaaaaaaaaaaaaaattagttaggcgtgatggtatatatttttatttttaattatttgggagggtgaggtgggaggatcgtatttgagtttgataggttgaggttgtagtgagttgtgattatgttattgtattgtatttttgttggggtgatagtaagattttgttttaaaaaaaaaaaaaaaaaaagtttgattgttttagatttattttataatgattaatttgaattaagtcgttttattttttgtttggataattgtaatggagtttttattagtttttttgttttttttgttttttataatttttttaatattatttttttgtttaaaattaatagtggttgttttttttggttttttaagtaggggttaaagtttttataatggtttatatgttttataaggtgtgattttggtttttttatattttgatttattttttatttgttttttttattttagttatattggtttttttgttgttttaagtaatttattgtttcggggtttttgttttgttttttttgtttggaatgttttttttaaagcgtggtttttttattttttttaagtttttgttttaatgttattttatgagtaaggtttttgggtttttttgtttgtttttcgagtttttattattttttgtttttttgtgttttgttttgagtttggggagaatgatttttttagaaagtaatttgggtttttttgttttaggtttttgagtgggtttggtgaatgggaggtgttattaggagatgaaaggtaagaggggagagatgttggggtattttttttttttgtattttttttgttttgttttgggtagtggttgtgtttttttcgattatagttgtatttgggaatggattttatatttttttgtttttttatttacggatttttaataatatgattttttttttgatttttagtttttaaagtagttatgttttttagtttttgtttgtttttttggtgttttaatatttttgttgtttgggttttttgaattttgtttatttttttcgttttttttttaagatttgaatttttcggttgggcgtagtttttaacgtttgtaattttagtattttgggagatcgaggcgggtagattgtttgaggttaggagtttgagattagttcggttaatatggtgaaattttgttttaattaaaaatataaaaattagttggggatggtggtaggtatttgtagttttagttattcgggaggttgaggtaagagaatcgtttgaattcgtgaggcggaggttgtagtgagtcgagatttcgttattgtattttagtttgggtatggtagcgagatgttttaaaaaaaaaaaaaaaagtgtagttgttatggaaaatagtatggtgtttttttaaaaaataaagtaggttggagtgtagtggtgtgattatagtttattgtagttttaattttttgggtttaagttattttttcgttttagttttttgagtagttgggattataggttcgtgttagtaagtttggttaatttttttttttgtattttttgtagagataggggtttcgttgtgttgtttaggttggtgttaaatttttgggtttatttatttattttagttttttaaatgggattataggcgtgaattattgtttattgcgtcgggtttttttgtttttgtttttgtatacggtatatgttattatttaatatattatatttttacgtatttttttatttttttttattttttatattttggatggtaagttcgaaggcgtagggatgtttgtttattgttgtattttaagtggttggtatatcgtcggttgttagtaaatgtttttgaaatgaatgaatgagtgaatgatcgataaggggagttaaggggaaggtagcggtgcggttcgcgtcgtaggtagaagagttgattttttaattttcgttttttttttcgttttcgttcggaatgttgagtgttcgagaaggaggcggaaatgagcgcgtttaatagtttattagtcgggtgtttatttaattagggtttgtatttcgaggttcgtttgtgtttaatcgttcgtttaatggtttcgtttggtttcgggcgggcgcgggggaatttgcgaggcgagcgtaggtttggttattttgtttcgtcgggggtttattttattgcgtcgcgcgggtgcgcgtagatttgattttttttcgggtataaaaagcgttttgcgggagatttaggtcgggagggcgcggagtttagcgagtagttttaggtttttttaatcgcgtggtttatttttagttttagttttagttttagttgttgggtttattcgtcggttaagggaatgttttcgagatattagatgttagttgttcgttgtatttttagttatgaaattggaggattataacgttttttatttttttaatttaggggatgtggggatgttagaaagagagacggttcgttagatatttgagagtaataatattaggtagtatttgggtatttgttgtgtgttagatatgatgtttagcgttttaaattttttaatttatttaatatttatttatgagagggtaaaatattaagattataatagttttatttgatagatgtagaattgaggtttagggggtttattttattttttcgaggttttagcgttattaaggggtgggatttggatttgaatttaggtggggtcggttttaagggtttatgttaggtttgagagagtaagatttttattttcgtaacgtaagtaatttatggtttagttataggtttggcggggaggaggacggatagattattaggttagttttggaaggttaaagaatttgttatttaaaattttaggttgggtttcgttttttacgtttgtaattttagtattttaggaggttaagggaagcggattatttgaggtcgggagttcgagattagtttggttaatatagcgaaatttcgtttttattaaaaatataaaaattagtttggtgtggtagtgggcgtttgtagttttagttattcgggaggttgaggtaggagagtcgtttgaatttgggaggcggaggttgtagtgagtagagatgacgttatcgtattggacgatagtgagattttattttaaaaaaataaataaaataaaaaaatttttttagtttttagttcgttttttaaatttttaaatttgagttggggacggggagggagaaggattaggaggtggtatttagggttttttaaggtagtagtagaaggtgaaggaggagtgaggggataggtgagagagattgatcgggaaagtttagtttcgtggggaagggtttgtggggtagtgattgagatttaggatcgtttttatggttagagtttatttgtgtgtagtaagaggaaagtatttcgtgtttaacgtagtggaatgagagtaacgtagaagaataacgaattttaggtttggcgtttattttttaggaagggtgtgggagagttgttttttaagggagattttttggaggttgttttgcgtagtaagtagtttttatttagattatatatagtattttagattaattttaaaatttttgcgttttaaaaattgtttttatttatattttatagaaagttgagaaagtgttatttatatggggggtaggggtgttggagattatgagattaataataatttttttagttcgtattttttggtattattatagtttttaaattttgggattttttcgattagtttttttttgtttagttgtgaaatggaagaagcggttcgggtgtggcggtttatgtttgtaatttgagtattttgggaggcggaggatcgtttgagtttagaagtttaagattagtttgggtaatatagggtgattttttatttttttttcgttttattatatcgttataaaaaatttttaaaaattagtcgggtgtggtggcgtaagtttgtagttttagcgggagttgagggaggagaatcgttttagttcgggaggtcgaggttgtagtgagtcgagatcgcgttattgtatttttgggcgatagagcgagattttgtttttaaaaaaaaaaaaaaaagaaaaaagaggaagttgtatttaatttagaaacgcggtttttcgggatttgttagttttatatttcggaggatttttttcggcgggttggtacgggaggtggagaaagaggtttgggcggtttcgttgtagtcgcgtgtgggaggacgtacgggtttgttttaaagttttgggataatagcgttttcgggggataatgaatgcggagttttcgtttttagtcgattttagatgtgtttttattttttttcgttgtagtcgtaaggtaaggaaatattttttttttcgtattgaggaggttgaggagtgtattgggtgttttttttttttttaatttagaattgcgagatagaggttgagtttttgtaaagaatagttttagaaaagttaggagagcgtaggagggtattcgggaggttaggaggggttcgttggggttttaatcgtatttatatcggttttatttgcgagggggcgggatttcgtggcgttggattaattagtatttatttgcgtttatttggttttttttcgttggttttcgggggttgcggtgtttaaaggggtaagagttgagcggaatatcggttcgtcgtcgcggtagttgttttatttttttttttgtagttatggggttttttcgtggatttttcgcgttttttttttttttttaggtattttatagtttcgtcgtggtttcgatcgggatcgttttttggggggcgggcggggttcgtatggggtagtggcgtcggggagagcgcggggttgcgttttttggggttaagggagtttcggaaggttcgtgaggattttgcggtgtggggagtgtagggtcgggtacgtttggatttagttttttttattttttgttttcgggcgtagg

SEQ ID NO: 18 - DNA, 5310 bp, Artificial Sequence
  chemically treated genomic DNA (Homo sapiens)
tttgcgttcgagggtagagagtgaaggaggttgggtttaggcgtgttcggttttgtattttttatatcgtagggtttttacgggtttttcgggatttttttggttttagggagcgtagtttcgcgtttttttcgacgttattgttttatgcggatttcgttcgttttttagggagcggtttcggtcggggttacggcgaggttgtggagtatttggagaaggaggagagacgcgagaggtttacgagggagttttatggttgtagagagaggggtgaagtagttgtcgcgacggcgggtcggtgtttcgtttagtttttgtttttttgagtatcgtagttttcgggagttagcgggaggaggttaggtgagcgtaggtgggtgttgattggtttagcgttacgaggtttcgttttttcgtaggtgggatcgatgtgggtgcggttgaggttttagcgaattttttttggtttttcggatgtttttttgcgtttttttggtttttttggagttgttttttatagggatttagtttttgtttcgtagttttgggttagaggagaaaagaatatttagtgtattttttagtttttttagtacgggaagagaaatgtttttttgttttgcggttatagcggaaaaaagtggagatatatttgaagtcgattgaaaacggaggtttcgtatttattatttttcggaggcgttgttattttaaagttttgaagtaggttcgtgcgtttttttatacgcggttatagcggggtcgtttaagtttttttttttatttttcgtgttagttcgtcggggaggatttttcggggtataaaattagtaggtttcgaaggatcgcgtttttgaattggatataattttttttttttttttttttttttttttttggagatagggtttcgttttgtcgtttaggagtgtagtagcgcgatttcggtttattatagtttcgatttttcgggttgaagcgattttttttttttagttttcgttgagattataggtttgcgttattatattcggttaatttttaaaaattttttgtagcgatgtggtggggcggggggagggtggagggttattttatgttgtttaagttggttttgaatttttggatttaagcgatttttcgttttttagagtgtttaggttataggtatgagtcgttatattcggatcgttttttttattttatagttaaataaagggaagttagtcgagaaagttttagagtttggaagttgtagtggtgttaaagggtgcgagttaagagggttgttattagttttataatttttagtatttttattttttatataaataatatttttttaattttttgtaaaatgtaaataaagataatttttaaaacgtagaggttttgaaattggtttgaaatattgtatataatttgggtaaaaattgtttgttgcgtaaagtagtttttagagagttttttttggaaaatagtttttttatattttttttaggagataaacgttagatttgggattcgttgtttttttacgttatttttattttattacgttagatacgaagtgttttttttttgttgtatataagtgggttttggttatgaaaacggttttgagttttaattattattttataagtttttttttacggagttgagttttttcggttagttttttttatttgtttttttattttttttttattttttgttgttgttttgagaagttttggatgttattttttggttttttttttttttcgtttttagtttagatttaggggtttgaggaacggattggagattggagaggtttttttgttttgtttgtttttttgagatggagttttattgtcgtttagtacggtggcgttatttttgtttattgtaattttcgttttttaggtttaagcgatttttttgttttagtttttcgagtagttgggattataggcgtttattattatattaggttaatttttgtatttttagtagagacgggatttcgttatattggttaggttggtttcgaattttcgattttaagtgattcgttttttttggttttttaaagtgttgggattataggcgtgagaaacggggtttagtttggagttttaaatgatagattttttgattttttagggttaatttggtaatttattcgttttttttttcgttaggtttgtggttaagttatggattgtttgcgttgcgagggtgggggttttgtttttttaggtttagtatgggtttttaaggtcggttttatttgggtttaaatttaggttttattttttagtagcgttgaagtttcggggaagtaaaataaattttttgggttttagttttgtatttgttaaatggggttgttatgattttagtattttatttttttatagatgagtattaaataaattagaaggtttaaaacgttaaatattatatttggtatatagtaagtgtttaaatgttgtttggtattattgtttttagatgtttggcgagtcgtttttttttttagtatttttatattttttgaattaagagaatgagaagcgttgtaattttttaattttatggttgagggtataacgagtaattggtatttggtatttcgggagtatttttttagtcggcgggtgagtttagtagttggggttgggattgaggttgggggtggattacgcggttgggaaagtttggggttgttcgttgagtttcgcgttttttcggtttggatttttcgtagggcgttttttatgttcgaggggaggttaggtttacgcgtattcgcgcggcgtaatggagtgggttttcggcgggatagggtggttaggtttacgttcgtttcgtaggttttttcgcgttcgttcggagttagacgaagttattaggcggacggttaaatataaacgagtttcgggatgtaggttttaattaagtaaatattcggttggtgggttgttgagcgcgtttattttcgtttttttttcgggtatttagtatttcggacgggggcggagagaggagcggagattggagagttagtttttttgtttgcgacgcggatcgtatcgttgttttttttttagttttttttgtcggttatttatttatttatttattttaaaaatatttgttgatagtcggcgatgtgttaattatttaagatataatagtgaataaatatttttgcgttttcggatttgttatttagagtgtggagggtagaggaaagtgaaaaaatacgtggaaatataatatgttagatggtaatatgtatcgtgtataagaataaggataggggggttcggcgtagtgggtagtggtttacgtttgtaattttatttagaaggttgaggtgggtggatgagtttaggagtttgatattagtttgggtaatatagcgagatttttgtttttataaaaaatataaaaaaaaaaattagttaggtttgttggtacgggtttgtagttttagttatttagaaggttaaggcgggaggatagtttgagtttaggaggttgaggttgtagtgaattatgattatattattgtattttagtttgttttattttttgaggaaatattatattgttttttatagtaattgtatttttttttttttttttgagatatttcgttgttatgtttaggttggagtgtaatggcgagatttcggtttattgtaattttcgttttacgggtttaagcgatttttttgttttagtttttcgagtagttgggattataggtgtttgttattatttttagttaatttttgtatttttagttgaggtagggttttattatgttggtcgggttgattttaaatttttgattttaggtaatttgttcgtttcgattttttaaagtgttgggattataggcgttagagattgcgtttagtcgggaggtttaagttttaaggaagggacgagagaaatgggtagggtttagggagtttagataataggggtgttgaggtattagagagataaataaaagttggaaggtatgattattttgagaattgaaggttagagaggaaattatgttattggaagttcgtggataaggggatagggaagtgtgggatttatttttaaatgtagttgtgatcgaggaaggtatagttattgtttagagtagagtagagaaagtgtagggaaaaaaaatattttagtatttttttttttttgttttttattttttggtggtattttttatttattaaatttatttagaagtttgaggtaagaaagtttaggttgttttttagaggggttattttttttaggtttaggatagggtatagaagggtagaaaatgatgggaattcggagagtaaataagaaagtttagaggttttatttataaagtggtattagaataaagatttgaaggaagtgaaggaattacgttttggaaagagtattttaggtagagaaaatagggtagaggtttcgagatagtagattatttggaatagtaagaaagttagtgtggttggagtagagagagtaagtaggaagtgagttagagtatgggagggttaggattatattttgtagagtatgtaggttattgtaagaattttggtttttatttggggaattaggggaggtagttattgttggttttgagtagaggagtgatgttgagaaaattataagggataagggaagtagggaggttggtgggggttttattgtagttatttaggtaaaagatgaaacggtttggtttagattggttattatggagtgggtttgaaatagttagattttttttttttttttttttgagatagggttttgttgttattttagtaggggtgtagtgtagtggtatgattatagtttattgtagttttaatttgttaggtttaagtgcgatttttttattttatttttttaagtagttggaaataaaggtgtgtgttattacgtttggttaatttttttttttttttttgagatggagtttcgttgtgtcgtttaggttagggtgtagtggtgcgatttgggattattgtaattttcgttttttaggtttaagcgattttttcgttttagttttttgagtagttggggttataggcgggtgttattacgtttagttaatttttgtatttttaatggagatggggttttgttttgttggttaggttggttttgaatttttgattttaggtgatttgtttatttcgattttttaaagtgttgggattataggtataagttattgtattcggtttaattttttaattttttaattttttttttttttttttt

SEQ ID NO: 19 - DNA, 6050 bp, Artificial Sequence
  chemically treated genomic DNA (Homo sapiens)
tatttttttttgttaaaaagttaagagttgtttagaaggaaaaaatagttttttttaaagaggttaaatttttagtattaattagttgtagtagtggtatgtgtgtgtgtgtggggggggggtggtatggtaattttgtgtttttagtgttttaaataggggtaatttttttgtttacggtttgagttatcgaatgagtaatttcgattttttaagattttttattgggtttacgtgtgtgtgagttttataggaattgtggaatgttttttttttttgttgggtttagatatttagaatgaataaattaaagggtagtggtaatatggttattgttattgtagataatgtggtatttatatatgggtattagttgttttttttatggggtttaggaataagggtaagtttgattttttattatgaattattggggtgttttttatatatagaggttgtattagttgaaaatagtttaaatattttgtaattttgttttttttaatttttgtttatttatattttagaataaaagagtttgtttagtttttttaaagatttaaagaatattatttatttgttttttaagtatttaaaaagtataatcgtttatatttattttggttggatgaggatatgtatttatttatttatttaagagatatttattgttagatttggtggtttacgtttgtaatttcggtattttgggaggtagaggtgggaggattatttgaggttaggagtttaaggttagtttgggtaatatagcgagattttatttttataaaaaataaaaaattagttgggtatggtggtatgtgtttgtggttttagttatttgggaggttgaggtaggggtattgagtttaggagtttaaggttgtagtgagttataattatattattgtattttagtttgggtaatagagtgagattttgttttaaaaaaaagaaagaaaaagaaaaagaaaaggggtatttattgaatatttattatgttttaggtattgtgttagattttaagtgaatattagtatatgaataagataaaggcgaaaagttattaaataagtttaagttgatttcggtatatgtatttttttgatttttggtttcgtgttttgattataattttttattattagattagatttttttaaataaataattatttttgtatgttggggatgggttgtgtgcggtagtatttacgtaggcggtatagatagtagttttttatttaatgttgtaataatattaggttaaataatgtgtattgattttaaaagtgtggggttaggttttttttaagtgttatagggagagtgtaaagtaggaaaagtttatcggatgaggaaatattgtagagggaaagtgaatttttttttaatttgggttaaaatttagatgtggaattttatttttttttttatttttggatttttagataggaggaatttagtatatagataattatgaattatatatattttggttttatatgtttagatttgtttagagtatgaaatttttgttttgttggaaggtagcgtcgtgtttacggaggtatataagtatttgttttaaagttattttgatttgtagatttgtaaatggtaaaaataattttatatgtttgttttgatttgtttttatttttaggttattttgtgtgagttttattttttagaatgtgattttgtagttttgaaatggatattatgagtagattgagatgtgagaatatgttagaatgattataggttcggatgttagtggggtaggagagggagtttgagattgtattggtttatattgtggtttttggttgagtatttggtttgtttggatgatgttttggttttatttaatttttattattttattatttagaggatagaggatttgagttttatttttgtattgtagttattttttttgggatttgtttttaagtttttttttgtgttgtttggtattttttttttattttttttaaattatttattgttattttgtaagttcgattgatttgttggtttttttatgagattggaatttttttgagggtcgggataggtttattttttttattatagtgagtattagtttttagtttagttaatagttttgttaaataaataattgaataaaattatttgttaaataatggtttgttttttttagaggatggatttagtttgttttttttagaggatggatttagtaagtttttaattttggttataatggtgttagaaggaaagagttaagttatttggaggaaataggtttatttaaagatttttttttttttttttttttttaattggtaaaggtaggataagtgtatttgagataaattttggatataaaattttgatatattttttaggtattggtcgagatgttttggatttgaaagggaagtaaattaaattattttaggtttttttttttttttttttggagatagaattttgttttgttgtttaggttggagtgcggtggtacgatttcggtttataggaatttttgtttttcgggtttaagtaatttttttgttttagttttttgagtagttgggattataggcgtgcgttattatattcggttgttttgtatttttagtagggatagagttttattatgatggttaagttggtttcgaatttttggttttaagtgatttattcgtttcgggtttttaaagtgtaggaattataggagtgagttatcgtatttagttaggttttttgttaagtggtttgagatttagttgtgaatggtagttatggttagatttaggaatttaaagtttgatttattttgtttgaagttaatattaataataagagagatgtatttggttttataatttttttttttttcgtttttttttttttttttgtaattaaggatagaattagaagtatcgaaggtcgtagaattgttttaggatttagagtagttttaaggaatttgtgtttacgtattatgtgtgttttttcgtttttttttttttttatgagtgagaaaaaaaagcgtttaaatttttattaatataaattaatgatatataatgatgaaattttgtttttatttttgtttgtgatagggaatgtaaaaatagtaagtggtttagttttacgaattttcgttttttgtttttttcgtttttgtcgggttggatttttaagaatggaggttagcgtatagtttcgcgcgggtcgtttagttttcggattcggcggatgatgttaggcgacgggagcggtcgcggtcgggtcggggaggtcgcggtttaggggagttgggagggagggtggtttcgttaggtcgacggcgcgttcggtcgcgcggcgttgtttggagacggttttggcggcgttgtgttgttgtaaatagtcgtttttttgttattatttatagtaggattttttggttttcgggcgcggcggttggaggtaggtttgcggttcggtttttcgcgcgtttcgaattattcgttcgtcggttttattttgtttcgtttttttttaggtgtttatcgcgggtttcgattttcgggttcgaagagtggagaagggaagatcggggttgtgcggggatatgcgttttcgcgttttggaggtggttagcgcgttggggttgagtttcggtagcgtgatttcggttgttttacgtagtagggtaggagattggggggcgtggtatattttggagtattttgtttttttaaagtttcgtgttttaggacgtggagtcgtttttggggttttagtagtcgaggtatttcgtttaggcgtagttggatattgtttttttagttttcgttttttattttttaagttcgcgttggaaaattattcgttgcgggttttcgtaagtatagttttttggcgggatcgaattagtttttagcgtagatttgagtttttcgtaggaagtatatttcgttttgttatttcgaattgattattttgtttatataattatatttcgtattttttatttttggggtttagtttagaatcgggtagatattttttttaaatgttttcgtacgtaggttttgtatagtgtttatttgttggtgttttagggatttgatagtttttttaatatttttatatatggtcgagaaaaataaataaataaatgcgttgttttttttaaaaaaataaataaataaagtatttagtatcgtaaagtaggttatcgtatttttttattttggattttttattttttgtttttaaacgtaggaatagtgttagtattgttcgagttcgagggttggaggttaggggatgaaggtttgtttttacgttttgtattgaattagggttagaattggggatgggggtaggggcgtattttttcgggagtcgaggtttaagttttcggggttttgtattcgatgtcgttttttttatttttgagttttagaattgtttttagttttcgtataagggtaaaaaggcgttttttgttttatttttttcgatttcgggaataagggttcgtattgaattaggtgcgaatgtttttttttattttgcgtcgttttcgtttttttttttttagtcgcggttttcgttttttttcgtattgtattttcggtgttggttgtagttcgcgagtagttttcgttaatttttttttttttatataggatgtttatattaggatatttgcgttagtaggtttttacggtttttttttgtagttttggggggagttattttcgaaattttttattttggggggtttacgagatttttgagataggaattgcgaaatgtttacgagattaggatacgcgttaaggcgggggtagggagttgcgagcgttggggacgtagtcgggcggtcgtagaagcgtttaggttcgcgcgttatttttttggcgttatcgtggttgagttcgtgacgtttatatttatttataaaacgtttgttataaaagtagtggttgcggcgtttcgtattttaatcgtatttgtagcgagtatttgagaagttaagattgagtcggcggtcgcggcgtagcgaacgagtagtgatcgtgtttttatttagttttgttttatagcgtttatttgttttcgtttttcggtttttcgttcggttttgtttaatcgttacgatgatgttttcgggttttaacgtagattacgaggcgttattttttcgttgtagtagcgcgttttcggtcggggatagttttttttattattatttattcgtagattttttttttagtatgggttcgtttgttaacgcgtaggtaaggttggtttttcgtcgtcgcggggtcgggggtttggggtcgcggaggaggagatatcgggcgggacgttttagtagatgagtagggggtttttttgtgtttggagggaggttgtcgtggtcggagcggtgtcggttcgggggttcgggatttgttttgagcgtacgtacgtttgttatagtaagaattggtttttttttcgggaggtaggttcgttttgagtaatttttggtttgtattttaggacggatttttgatattagttggagtagacgtgttttaagtataaattcgttaattagagtttggttttttcggggaggtggtagaaagcggtaattttttttttttcggtagtttggagtacggaggagggatgagggaggagggtgtagcgggcgggtgtgtaaggtagttttattgataaaaagcgagtttattttggagatttcggagcggcgtttgcgttagcgtagacgttagggatatttataataaatttttttttaagtaagtgatgttgaagggataacgggaacgtagcggtaggatggaagagataggtattgcgttgcggaatgtttgggaggaaaagggggagattttttatttaggatgagggatatttaagatgaaatgttcgtggtaggatcgtttttttttattgttgtatgcggtattgggaattcgttttatttgtgttcggaatttgttcgtttacgtcggttttttttttttgttttgttttagg

SEQ ID NO: 20 - DNA, 6050 bp, Artificial Sequence
  chemically treated genomic DNA (Homo sapiens)
tttagaataaaatagaaggggaaagtcgacgtgagcgagtaggtttcggatataggtggggcgagtttttagtgtcgtatgtagtagtgaagagaaacgattttgttacggatattttattttaaatgttttttattttggatgaaaggttttttttttttttttttaggtatttcgtagcgtagtgtttgttttttttattttgtcgttgcgttttcgttatttttttagtattatttgtttgaaagggggtttgttataaatatttttgacgtttgcgttgacgtaggcgtcgtttcggagtttttagaatgaattcgttttttattaatgaaattgttttatatattcgttcgttgtattttttttttttatttttttttcgtgttttaggttgtcgggggaggggggattgtcgttttttgttattttttcggagaagttaggttttagttagcgagtttgtgtttgggatacgtttgttttagttaatgttagagattcgttttggagtgtagattagaggttgtttagaacgaatttgtttttcgaagggggaattaatttttattatggtaagcgtgcgtgcgtttagagtaagtttcgagttttcgagtcggtatcgtttcggttacggtagtttttttttaggtataagggagttttttatttatttattggagcgtttcgttcggtgttttttttttcgcgattttaagttttcggtttcgcggcgacgggaagttagttttatttgcgcgttgataggcgagtttatgttggagaaggagtttgcgggtgagtggtagtaagagaggttattttcggtcggggacgcgttgttgtagcgggaggatgacgtttcgtagtttgcgttgaagttcgagaatattatcgtggcggttaggtaaagtcgggcgaggggtcgaggggcggagataggtgggcgttgtggagtagagttgggtaggagtacggttattgttcgttcgttgcgtcgcggtcgtcggtttagttttggttttttagatgttcgttgtagatgcggttggagtacgaggcgtcgtagttattgtttttataataagcgttttatgaatgagtgtaaacgttacgggtttaattacggtggcgttagaggggtggcgcgcgggtttgggcgtttttgcggtcgttcggttgcgtttttagcgttcgtagttttttgttttcgttttggcgcgtgttttaatttcgtgagtatttcgtagtttttgttttagaggtttcgtgggttttttaagatgaggggtttcggggatggttttttttagggttatagggaaaggtcgtggaaatttgttgacgtagatgttttaatatggatattttgtgtaaggggggagggattgacgggaattgttcgcgggttgtagttaatatcgagggtgtagtgcggggggaggcgggggtcgcggttgggggaggggaggcgggaacggcgtagaatgagagagaatattcgtatttggtttaatgcggatttttgttttcgaggtcgggggggatggggtagagagcgtttttttatttttgtacggaaattgaagatagttttgaggtttagagataggagaaacggtatcgagtataggatttcgaggatttaagtttcggttttcgaaggaatgcgtttttatttttatttttaattttagttttaatttagtgtaaagcgtggaagtagatttttattttttaatttttagttttcgggttcgagtaatattagtattgtttttgcgtttggaagtagaaagtggaggatttaaaataagagaatacgataatttattttacgatattgggtattttatttatttatttttttaaagaagatagcgtatttatttatttatttttttcggttatgtgtgggaatattaaggaaattgttaaatttttgagatattagtagataaatattgtgtaaaatttacgtgcgaagatatttgaagggggtgtttgttcggttttgagttgggttttaggggtagggagtgcgaggtgtggttatgtgggtagggtggttagttcgggatgataaggcggggtgtgttttttgcggggaatttaaatttgcgttgagggttggttcggtttcgttaggaagttgtgtttacgggagttcgtagcgggtgattttttagcgcggatttggagggtggaggacgggggttggaaggatagtgtttagttgcgtttgggcggaatatttcgattgttgggattttaggagcggttttacgttttggaatacggggttttggggaggtaaggtgttttagagtgtgttacgttttttaattttttgttttgttgcgtaggatagtcggggttacgttgtcggggtttagttttagcgcgttggttatttttagggcgcgaagacgtatgttttcgtatagtttcggtttttttttttttatttttcgggttcgggggtcggggttcgcggtgggtatttggagaggggcgaggtaggatgaggtcggcgggcggatagttcggggcgcgcggggagtcggatcgtagatttgtttttagtcgtcgcgttcgggagttaggagattttgttatagatagtaatagggaagcggttgtttatagtaatatagcgtcgttagggtcgtttttaggtaacgtcgcgcggtcgggcgcgtcgtcggtttggcgaggttatttttttttttagtttttttgggtcgcggttttttcggttcggtcgcggtcgttttcgtcgtttgatattattcgtcgggttcgggggttgagcggttcgcgcgaggttgtgcgttaatttttatttttagagatttaattcggtaggagcggggagggtaggaggcggggattcgtggaattgggttatttgttatttttgtattttttgttataggtagaggtgaaaatagaattttattattgtatgttattggtttatgttggtgggaatttaggcgttttttttttttatttataaaaagggagggaaacggaaaaatatatataatacgtaaatatagattttttggagttgttttgaattttaaagtaattttgcggttttcggtatttttaattttatttttgattatagaaagaaagagggggacgggagggaaaggggttatgaagttaaatatattttttttattattaatattagttttagataaaataggttaagttttgaatttttgagtttggttatgattgttatttataattagattttaggttatttaataggaaatttgattgggtgcggtggtttatttttgtaatttttgtattttgggagttcgaggcgggtggattatttgaggttaggagttcgagattagtttggttattatggtgaaattttgtttttgttaaaaatataaaatagtcgggtgtggtggcgtacgtttgtagttttagttatttaggaggttgaggtaggagaattgtttgaattcgggaggtagaggtttttgtgagtcgagatcgtgttatcgtattttagtttgggtaatagagtaagattttgtttttaaaagaaaagaaaagaaaatttagaatgatttgatttattttttttttaggtttaaagtatttcggttaatatttaaaagatgtgttaagattttatatttaggatttattttaaatatatttattttgtttttgttaattaaaaaaaaaaaaaagaagaagggtttttgagtgagtttattttttttagatagtttaattttttttttttggtattattatgattagagttggagatttattaaatttattttttggaaaggataaattaagtttattttttggaaaggataaattattatttaataaataattttgtttaattatttatttaataaaattattgattgggttggaggttggtgtttattgtaatgaagagggtaggtttgtttcgatttttagagagattttagttttataggaagattaataagttaatcgagtttatagggtagtagtaagtggtttgaaagaggtaagaaaggggtgttaggtaatatagaagaaggtttggaaataggttttagaggaggtgattgtaatatagagatggggtttagattttttgttttttggataatggaatgataaagattgagtaaggttagagtattatttaggtaaattaagtgtttaattagaagttatagtataggttaatataattttagatttttttttttgttttattaatattcgaatttgtgattattttaatatatttttatattttaatttgtttatggtatttattttaggattgtaaaattatattttaaaaagtggagtttatataaggtagtttaaaaatgaagataaattagaataaatatgtgaaattatttttgttatttgtagatttgtaggttagggtgattttgagataggtgtttgtgtgttttcgtgagtacggcgttgttttttaatagggtagggattttatgttttggataagtttgagtatataaaattaaaatgtgtgtagtttatgattatttatgtgttgagttttttttatttggggatttaaaagtgaaaaggagggtagaattttatatttgaattttaatttaaattgaaaaaaaatttattttttttttatagtgtttttttattcgatagattttttttattttgtattttttttgtggtatttgaaggagatttgattttatatttttgaagttagtgtatattgtttagtttggtgttattgtaatattaagtgaaaggttgttgtttgtatcgtttacgtaaatgttgtcgtatatagtttatttttagtatgtagaagtagttgtttatttggggaagtttggtttagtggtgaagggttgtggttaaagtacgggattagaagttaggaagatgtatatatcgaaattaatttagatttgtttggtaatttttcgtttttgttttgtttatgtgttgatatttatttaggatttagtatagtgtttgaaatatagtaggtgtttaataaatatttttttttttttttttttttttttttttttttgagatagggttttattttgttatttaggttggagtgtagtggtgtgattatagtttattgtagttttgaatttttaggtttaatgtttttattttagttttttaagtagttaggattataggtatatattattatgtttagttaattttttattttttgtagagatggggtttcgttatgttgtttaggttagttttaagtttttggttttaagtgatttttttatttttgttttttaaagtgtcgagattataggcgtgagttattaggtttggtaataaatattttttgaatggatgaatgaatgtatgtttttatttagttaaggtgaatgtagacggttgtgttttttgggtatttagaaagtaaatagataatgttttttaaatttttggaaaggttgaataggtttttttattttgggatatgaataggtaaaaattgggaaagataaaattataagatgtttgggttatttttagttggtatagtttttgtgtataaagaatattttagtggtttatgatgaaagattaaatttatttttgtttttgagttttatgagaaagatagttagtgtttatatataaatattatattgtttgtaatgataatgattatgttattattattttttaatttatttattttaaatgtttggatttaataagagaaagaggtattttataatttttgtgggatttatatatacgtgagtttagtgaagggttttaggaggtcgaggttatttattcgatggtttagatcgtgagtaaaaagattgtttttatttagaatattggaggtataagattattatgttattttttttttatatatatatatatgttattattgtaattaattagtattagagatttagtttttttgagaaaaattgttttttttttttgaataatttttggttttttgataggagaggatg

SEQ ID NO: 21 - DNA, 4501 bp, Artificial Sequence
  chemically treated genomic DNA (Homo sapiens)
ttagggagtaaataaattatgtgtggggttgggtaattagttgagtcgaagcgtaaataaaatgtgaatatacgtttgcgggttatatatagtgtatttttattagtatttagaaaaaattgtgagttagtgaattaggaaattaatgtttggaaggtagttaaattttaattagtttaagatttttttttttttttaaaaaaaggtacggaagtaatatttttttttttttttttgattagaatcgatgtattttttgtgtatgatcgtatttttaataataaaaggggaaagaggatttggaaaggaattaaacgttcggtttgttcggggaggaaagagttaacggttttttttataagggtttttgttgattttttcggttcggtttataagttttttatttgttttttttaggaagttcggtttcgcggttcgggtattttttgttttttttatattttttcgtttagtatttttgattttttttaaattcggtagttcgagattgttgtaaatcggcgttatagggcgtaaaggggatttgttttttttgaaatttggttgagaaattgggaatttcgtgtgggaggcgtgggggtgggacggtggggtatagattggtagagagtaggtaatttttttttcgttttagtttagttttggaataggtagatatattttagggttaaatagacgtttttcgtacggggttttacggaagtttgagtaggcggggtaggaggggcggtatttgttgttttggtagtaaattgggggatttagtttgggtggaaggtatttaatttagatagttgtgtatatataatgtataatatatgattttttttaataaatgtaatgggagtttatttataacgcgttttttaagtatacgtggtaatgcgttgttgggttattttaattattttaggtatcgtttttttttttatgtttttattatttttttttatttatattaatattttacgttttgaacgcgcgtttattaatattttttttttttttattttttttgggatttttgattaaagcgcggttttttttttagttttagcgaggcgttttgtagtttggtacgcgcgtggcgtggcggtgggcgcgtagtgcgttttttgtgtggagggtagttgtttcgtttgcgatgatttatatttataggataaggatgcggtttgttaaatagtattgttacggaggagtagtagagaaagggagagggtttgagagggagtaaaagaaaatggtaggcgcgcgtagttaatttatgcggtttttttattttgtttatattttagagttagagtgttcggttgttcggttgagttttttttttattttttttattttttttattttttttataagcgtttttttcgggtttttaaagtagagggcgtgggggaaaagaaaaaagattttttttcgttaattttcgtttatcggttttttataatgcgagggtttggacggttgaggattttcgagttgtgttgttcgcggtcgttatcgtcgggtttcggtcgtttttggttttttttttgtttcgagaagggtagggttttttagaggtttggcgggaaaaagaacggagggagggatcgcgttgagtataaaagtcggttttcggggttttatttaattcgttgtagtaattttagcgagaggtagagggagcgagcgggcggtcggttagggtggaagagtcgggcgagtagagttgcgttgcgggcgttttgggaagggagattcggagcgaatagggggtttcgtttttggtttagttttttcgttgattttttagttagcggttcgtaatttttgtcgtatttacgaaattttgtttatagtagcgggcgggtattttgtattggaatttataatattcgagtaaggacgcgattttttcgacgcggggaggttattttgtttatttggggatattttttcgtcgttgttaggattcgtttttttgaaaggttttttttgtagttgtttagacgttggatttttttcgggtagtggaaaattaggtaagtatcgaagtttatttgttttttaatttatttttttattattttaatgttgagatgagtcgaatgtttaaatagggtgtttttttttttatttttgcgttattgatattttttttagagtagttatggtaattggggttggggtggggggtaatttagaattggatcggggtaaagtgatttgttaagatgggagaggagaaggtagagggaaaacgggaatggtttttaagattattttttcgagatttttgttttatgaatatatttacgttgattttcggtcggtcggatatttttgttttattgtgttaattgttttttgggttttggggggttgggggttgttttgcggtgggtagaaagttttttgtattttgagttttttggagtagggatcgtatatcgtttgtgtgagttagatcgtttcgtagtcgttgatttgttttcgttttcgggagggtatttaaatttcggtttatcgtatttttgatagtcggagacggatattgcggcgcgtttcgttcgtttgttttcgcggcgattttaattcgttttgatttttttaagaagttggtatttggttttttaaaaagtaataatataatttaaaatttgggtttttagaggtgttaggacgtggtgttgggtaggcgtaggtaggggaaaagggaggcgaggatgtgttcgatttttttggaatcgttgatttggaaaaattagggcgaattttcgtatttagttttgatttttttgtcgcggtcgttttcgggtgttttcgcgttcgagatgcggaggaattgcgaggagcggggttttgggcggttttagaatagttgttatttttggtggggtggtttcgggggaggtatcgtagcggggtttttggcgtagttgtattttcgtattgagtgcgaagggaggtgtttttattattatttgatattttttttgtatttatggaggggtgttaaagttcgcggttgagttcgttattttagtcggcgagagaaagaagaaaagttggtaaaaggagtgttggacgggggcggtattgggggtggggacgggggcggtggagagggaaggttgggaggggttgcggtgtcggcgggggtaggagagcggttagggcgcgagtgggaatagtcgtagcggaggggtttcggcgcggagcggggtttacgtagtcgttagcgtttaggcgtttttcgtttttttttttaggtggcgtaaaattttgtgttttggattttggtaaattgttttttttatcgttatttttcgcggttttttaagggcgttagggtcgatttcgatttttttgtcgttgcggggtcgattttcgggttttgcgtttcgggttttcgggggagcgggggttcggcgggtattaagtcgttggtttattaagtgcgttttcgagatagtaggggattgtttaaagggggtgaaagggtgttttttttatttttttattaagattatttagtcgttttaggggatagttttgtaaggggagaggttcgggattgtggcgcgtattgcgcgttgcgttaggttttcgtattaagatttttttaatttaagattgtttttcgttttgtgtgtttcgttttagtagtttttcgcgacgatgttttttaacgttagttttattaataggaattatgatttcgattacgattcggtgtagtcgtatttttattgcgacgaggaggagaatttttattagtagtagtagtagagcgagttgtagttttcggcgtttagcgaggatatttggaagaaattcgagttgttgtttatttcgtttttgttttttagtcgtcgtttcgggttttgttcgtttttttacgttgcggttatattttttttttttcggggagataacgacggcggtggcgggagtttttttacggtcgattagttggagatggtgatcgagttgttgggaggagatatggtgaattagagttttatttgcgattcggacgacgagatttttattaaaaatattattatttaggattgtatgtggagcggtttttcggtcgtcgttaagttcgttttagagaagttggttttttattaggttgcgcgtaaagatagcggtagttcgaatttcgttcgcggttatagcgtttgttttatttttagtttgtatttgtaggatttgagcgtcgtcgttttagagtgtatcgatttttcggtggtttttttttatttttttaacgatagtagttcgtttaagttttgcgtttcgtaagattttagcgtttttttttcgttttcggattttttgtttttttcgacggagtttttttcgtagggtagtttcgagtttttggtgttttatgaggagatatcgtttattattagtagcgattttggtaagcgaagttcgtttaggtttgttaaaagtgggcggttggatatttttt

SEQ ID NO: 22 - DNA, 4501 bp, Artificial Sequence
  chemically treated genomic DNA (Homo sapiens)
gaaaggtatttagtcgtttatttttgataggtttgggcgggtttcgtttattagagtcgttgttggtggtgggcggtgtttttttatggagtattaggggttcggggttgttttgcggggaggatttcgtcgaggagagtagagaattcgaggacggagagaaggcgttggagttttgcgaggcgtaggatttgggcgagttgttgtcgttgagagggtaggggaagattatcgaggggtcgatgtattttgaggcggcggcgtttagattttgtaggtataagttggaggtggagtagacgttgtggtcgcgggcggggttcgggttgtcgttgtttttgcgcgtagtttggtaggaggttagtttttttgagacgagtttggcggcggtcgagaagtcgttttatatatagttttggatgatgatgtttttgatgaaggtttcgtcgttcgggtcgtagatgaaattttggtttattatgtttttttttagtagttcggttattatttttagttggtcggtcgtggagaagttttcgttatcgtcgtcgttgttttttcgaagggagaagggtgtgatcgtaacgtaggagggcgagtagagttcggagcggcggttaggggataggggcggggtgggtagtagttcgaattttttttagatattttcgttgggcgtcgggggttgtagttcgttttgttgttgttgttggtagaagttttttttttcgtcgtagtagaaatacggttgtatcgagtcgtagtcgaggttatagtttttgttggtgaagttaacgttgaggggtatcgtcgcgggaggttgttggagcggggtatataaagcgggaggtagttttgagttaaaggggttttggtgcggaaatttggcgtagcgcgtagtgcgcgttatagtttcgaatttttttttttgtagagttattttttaaagcggttgggtggttttggtgggggaataaagggagtatttttttattttttttggatagttttttgttatttcggagacgtatttagtgaattagcggtttggtgttcgtcgagttttcgttttttcgggagttcggagcgtaaagttcgggagtcggtttcgtagcggtagaggaatcgaaatcggttttggcgtttttaagaagtcgcgggaggtggcggtgaggaaaataatttgttaaaatttaaggtataaagttttgcgttatttgaaggagaaggcgagaggcgtttgggcgttagcggttgcgtgaatttcgtttcgcgtcggggttttttcgttgcggttgtttttattcgcgttttagtcgtttttttattttcgtcggtatcgtagttttttttaattttttttttttatcgttttcgtttttatttttagtatcgttttcgtttaatattttttttgttagttttttttttttttttcgtcggttggagtggcgagtttagtcgcgggttttaatatttttttataaatataaggggggtgttaaataataataggggtattttttttcgtatttaatacggagatgtaattgcgttagagatttcgttgcgatatttttttcggagttattttattaagggtagtagttgttttggaatcgtttagagtttcgtttttcgtagttttttcgtatttcgggcgcgaggatattcgagggcggtcgcggtaggggagttagggttgggtgcggagattcgttttggtttttttaagttaacgattttaggagaatcggatatattttcgtttttttttttttttgtttgcgtttatttaatattacgttttaatatttttagagatttaggttttaaattgtattattgttttttaaaaagttaaatgttaattttttaaaaggattagggcgggttggaatcgtcgcggggataggcgggcgggacgcgtcgtagtgttcgttttcggttgttagaaatgcggtgagtcgaaatttaaatgttttttcggagacggggataagttagcggttgcggagcgatttggtttatataggcgatatgcggtttttattttaaggagtttaggatgtaaggggttttttgtttatcgtaaagtaatttttagttttttaaaatttagagagtaattaatataataaagtaggaatgttcgatcggtcgggagttagcgtgaatatatttataaggtagaaatttcgaaagggtagttttaaaaattattttcgttttttttttgttttttttttttttattttgataagttattttatttcgatttagttttggattattttttattttagttttagttattataattattttgagaaaagtgttaatagcgtaggaatgggagaaaagatattttatttaggtattcgatttattttagtattaaagtgataaaaaaataaattaaaaggtaagtggatttcggtgtttatttggttttttattattcgaaaaaaatttagcgtttaagtagttgtaaggagagttttttagagaagcgggttttggtagcggcggggaagtgtttttaaatgggtagaatagttttttcgcgtcgggagagtcgcgtttttgttcgggtgttgtaagttttagtgtaaagtgttcgttcgttgttatgggtaaagtttcgtggatgcggtaagggttgcggatcgttggttgggggattagcgggagggttgggttagaggcgaagttttttattcgtttcggatttttttttttaggacgttcgtagcgtagttttgttcgttcggtttttttattttagtcggtcgttcgttcgttttttttgtttttcgttggaattattatagcgagttagataaagtttcgaaaatcggtttttatatttagcgcgattttttttttcgttttttttttcgttaagtttttgagaagttttgtttttttcgaggtaggaggggagttagggacggtcggggttcggcggtggcggtcgcgagtagtatagttcgggggtttttagtcgtttagattttcgtattataaagggtcggtgggcggagattagcgagagaggattttttttttttttttttacgttttttgttttgggaattcgggaggggcgtttatggggagggtggggagggtggggaaggtggggaggagatttagtcgggtagtcgagtattttagttttaggatgtaaatagagtaagagagtcgtatgaattaattacgcgcgtttattatttttttttgtttttttttaaattttttttttttttttgttgttttttcgtagtagtattgtttgataaatcgtatttttgttttgtgagtataaattatcgtaggcggaatagttgttttttatatagagaacgtattgcgcgtttatcgttacgttacgcgcgtattaggttgtagggcgtttcgttaaggttggggaaagggtcgcgttttgattaagagttttagggagagtggaggaaagaagggtattaatgggcgcgcgtttagagcgtgggatgttagtgtagatagggaggaatgatagaggtataaggaggaaaacgatgtttagaatgattaaaataatttagtaacgtattgttacgtatatttggagagcgcgttatgaataaatttttattgtatttgttggggggagttatgtattatgtattatgtatgtatagttatttggattggatattttttatttagattgagttttttaatttgttgttaaagtagtagatatcgttttttttgtttcgtttgtttaggttttcgtggggtttcgtgcgggaggcgtttgtttagttttgagatgtgtttgtttgttttagagttgggttagggcgagagggaggttgtttgttttttgttagtttgtattttatcgttttatttttacgttttttatacggagtttttaattttttagttaggttttagaagagataaattttttttgcgttttgtggcgtcggtttgtaatagtttcgggttgtcgggtttgggagaaattaaaggtgttagacgggagaatatgggaggggtagggggtattcgaatcgcgggatcggattttttaaaaggggtaagtggagagtttgtggatcgagtcgggggagttagtagagatttttgtgaaaaaaatcgttaattttttttttttcggataaatcggacgtttaatttttttttaggttttttttttttttttattattggaaatgcggttatgtataaaaaatgtatcgattttgattaaagaagaggagaggagtattattttcgtgtttttttttgggggggggggggagttttgagttaattaaaatttggttgttttttaggtattaattttttagtttattgatttataattttttttgaatattagtgaaagtgtattgtatgtaattcgtaaacgtgtatttatattttatttacgtttcgatttagttagttgtttagttttatatatgatttgtttgttttttga

SEQ ID NO: 23 - DNA, 1451 bp, Artificial Sequence
  chemically treated genomic DNA (Homo sapiens)
tagaaatagggttttattaggtttcgaatttttgggtttaagtaatttgtttgtttcggttttttaaagtgttgggattataggtgtgagttatagtgtttggttaaatattttattttttagattataagatgtttaattttatttttggtaaaaagttgatttagtaaattagggttttaagtgaagtcggttggggtttgaatttttgatatttgtttagggtggaagatatagtagttgtatttatgggttatttggggtgtagggtgattagttggaggttgtgagtttttttgttttttgaaatgtttgtacggggtatttaggaagggttggggattgggtgaggaggtgtggatagaatgttttttggaaattgttttaggggtagtttgagtggtttgagttgtgtttgttttattgaaggttggagttttagagaaaagtttttatggacggatttattttttagaattgttgtttttgcgggagaatatttttttttaggtgttgtttttagggtagtagggaagattgggaaaaattgaggggtaagagttgttggaggggggagttatatttattgagtgtttattatatgtcgggtgttgttgaaggtttgcgggttttataggatttttttttagatttttatatttttgtagattatacgtcgtttatagatgattttgaatttagaagggttgtttaggtttagggtttagttagtgagtggatgggtagaattagatttgttttggaagggtttgttttattttggcgtttaaaatgtgttttttattttttgttattaggataagtaaattcgagtattttttcgttaggggtttaagtttattatgggtttgatttttaaggttatattttcgtttttttatttgatagataggaaatttttgaaatgtttttcgtacgtgtaagacgttttcgcggtggcgggcgatagagggcgtatagtgggatcgtagtacgagttcggagtatttttagagtcggcgatttttgttttcgtttttgtcggtcggttttttcggggtttaggagggtagtatcgtcgggtttcgcgttatgatattagttttggagtggtgtagtgtgtaaagtttattggttggcgtggttcgggatacgttttcgcggagcggaataaaacggcgcgtaggtcgggcgtatttagtcgttattttcgagagcgtttgtcgtttttgcgtcgtcgagttagttgttaggtgagtgcgttttgagtcgcgcggttttgttcggcgcggaggggcgtttgggtacgtatttagcgtttttcggttttgttagtttcgtcgtagtttcggggttgtcgtaggcggggaattgtgagaagtgatcgtagttagttcgggtagtgttgtttttttttggaggtattaggttcgtttttatttcgggttttt

SEQ ID NO: 24 - DNA, 1451 bp, Artificial Sequence
  chemically treated genomic DNA (Homo sapiens)
gaaggttcgggatggggacggatttagtgtttttagaaaagagtagtattgttcgggttaattgcggttattttttatagtttttcgtttgcgatagtttcggggttgcggcggggttggtaagatcgggaggcgttgagtgcgtgtttaggcgttttttcgcgtcgggtagagtcgcgcgatttagggcgtatttatttggtagttggttcggcggcgtaggggcggtaggcgttttcggaagtggcggttgggtgcgttcggtttgcgcgtcgttttgtttcgtttcgcggaagcgtgtttcgggttacgttaattagtgggttttgtatattgtattattttagggttgatgttatggcgcgaagttcggcggtgttgtttttttaggtttcgggaaggtcggtcggtaggggcgggggtaggagtcgtcgattttgggggtgtttcgagttcgtgttgcggttttattgtgcgttttttgtcgttcgttatcgcgaaaacgttttgtacgtgcgaggggtattttaggagttttttgtttgttaggtgagaaggcggagatatgattttagaggttagatttatgataaatttgagtttttaacgaaagggtgttcgaatttatttgttttggtggtagagggtgagggatatattttgggcgttagggtaagatagatttttttagggtaggtttgattttgtttatttatttattagttgggttttgggtttagatagtttttttgggtttagggttatttgtgaacggcgtgtaatttatagggatgtgagggtttaaaaggagattttgtaggattcgtagatttttagtagtattcggtatgtaatagatatttaataaatgtaatttttttttttaatagtttttgttttttagttttttttagttttttttgttattttaaggataatatttggaaaaaggtgttttttcgtaaaagtagtagttttgaaaagtgggttcgtttatagaggtttttttttggggttttaatttttagtaggatagatatagtttaggttatttaagttgtttttggggtagtttttaggggatattttgtttatatttttttatttagtttttagttttttttgagtgtttcgtgtaggtattttagggagtagagaagtttatagtttttagttggttattttatattttaggtggtttatagatgtagttgttatgttttttattttgggtaggtgttaagggtttaggttttaatcggttttatttaaagttttggtttgttgaattaattttttgttaggaataaagttaagtattttatgatttagaaaatgaagtatttggttaggtattgtggtttatatttgtaattttaatattttgggaggtcgaggtaggtagattgtttaaatttaggagttcgagatttggtgaaattttgttttta

SEQ ID NO: 25 - DNA, 771 bp, Artificial Sequence
  chemically treated genomic DNA (Homo sapiens)
tgtcggtaaatttgttgatttaggttttacgagggagtaagtaatattggatttttttcggtatttcgagaatggggtgggggcgtttttaaaggatttttttttttttttagtgtttgtttttgttttcggttcgttttttgttaagatttggggatttttagggtttggagggaaagttttttgggacgattatagagcgttagtattgaattagtttggagagcgcggaaggaaagggtcggttcgtagagggcgcggggaaggtagggtggggacgcggtggagttcgcgttcgtttgttgaaggtttggaagtgtagcgtagaagatagagggtgattaggaagacgcgcgaacggggttggtcggtcggcgggtgggggaggggaggcgggggaaggcggttgagtgggtttttggagtgtgtgtgtttgtgttagtgtgtgtgtgtgtgtgtgtatgtgtgtgtttggcgtttggttagggtgattttttataaattatatgttttttagtttttttttaaaaggttgtgtcgagggttggttagtgaggttcggttcggggaaagtgaaagtttgtttgggttttttcggcgttagagtcgtttttcgtattttaggatagcggtgcggttttcggtcggggcgtttatttcgtagtagttagcgagcgagcgagcgagcgagggcggtcgacgcgttcggtcgggatttagttgttcgtatgatcgcgtcgggcgtcgtcgggcgttgtttttttacggtaa

SEQ ID NO: 26 - DNA, 771 bp, Artificial Sequence
  chemically treated genomic DNA (Homo sapiens)
ttatcgtgggagggtagcgttcggcggcgttcggcgcggttatacgggtagttgggtttcggtcgggcgcgtcggtcgttttcgttcgttcgttcgttcgttggttgttgcggagtgggcgtttcggtcgagggtcgtatcgttgttttgggatgcggagagcggttttggcgtcgagaggatttaggtaaatttttatttttttcgggtcgagttttattggttagttttcggtatagttttttaagagaggattggggggtatgtggtttatgggaaattattttggttaggcgttagatatatatatatatatatatatatatatattgatatagatatatatattttagaggtttatttagtcgttttttttcgtttttttttttttattcgtcggtcggttagtttcgttcgcgcgtttttttagttattttttgttttttgcgttgtatttttaagtttttagtaaacgagcgcgggttttatcgcgtttttattttgtttttttcgcgttttttgcggatcgatttttttttttcgcgttttttaggttgatttagtgttagcgttttatgatcgttttaagggattttttttttaggttttgaaaatttttaaattttagtagaaaacggatcgagagtagggataagtattgggaagggagggaaattttttgaagacgtttttattttattttcggagtgtcgaaaggagtttagtgttatttgttttttcgtggagtttgagttagtaggtttgtcggta

SEQ ID NO: 27 - DNA, 5942 bp, Artificial Sequence
  chemically treated genomic DNA (Homo sapiens)
taaggattaggattttaatataaatttagttttttattttttcgggttttttatgtttttttaaattcggtcgttttttatagttttttgtttttgggtttttttttatattttttattatttttttatttcgtatttaagattttatgaaaggtttttttagaaaagaaaaaatgaggagttttgcgatttgaatagtttttttttgttcgtttgtaaatttgaatttttggattttataatagtgagttttttttgtgtttattattcggtatgagtaagataagggggtgggtggtgggagagtggggaagtgtgggaaagaaaagtgtagataaatgggtggaataaagaagtttgatttaaagtttagatttgggggttagagttttggttttagtttaattaagtgtataagtttgataatcgtgggtttttttattatattggttttttttagtaaaattttatttatttttatttttagaggttttgattttttttattattttgtattataatatttgataatatgggtcgggagtggtggtttatgtttgtaattttagtattttgggaagtcgaggtcggcggattatttgaggtcgggagtttaagattagtttggttaatatggagaaatttcgtttttattaaaaatataaaattagttgggcgtggtggggtatgtttgtaattttagttattggggaggttgaggtaggagaattttttgaattcggggggtagaggttgtggtgagtcgagattatgttattgtattttagtttgggtaatgagagcgaaattgtattttaaaaaaaaaagaaaaaaattgataatatggtattttttttttttagttgtgaattttttgagggttgggaatgtttttatttgtatttttggtatatagtatatggatttatgtttgtgaaattagtgaattggttgtagttagggaattttttttgggggaagtgagatttgtacgaagttgggtaatttttggtttaggggggttgaaagaataggtgggggatttttaggagggtttgggatttgaaagtgaatttagattggtagggaggtgattttattatgttatttggagaggttgttttttttgatttaggtgggatttgtatgtggtttttaggtttttgtttggtttttttaaaatagtttttagaaaagtgaataaattataaatggttgatttatttttgatttttagttcgttttttacgaagatagagtttattgattaaaaattttaggatttgtatttgggtagattttaggaaggggaagttaaagggtttaggttagaggtttaagtttagattttagtagtagattagggttagattttattaaagttagaattcgaggtttatgtaagtttttagatttcgtttttaagttttgtttttttttttttttttttttttttttttttagtttagtgtggttattcgagggggttttttttttttagttatagttcgggtattttaagttgggaaatgtgttattcggggttggggtgttgatttgtagtttagttttttttggttttttttgaggatagtggggatgggattggtacggtttttatttcggggttttagttttatttttggtttttagtttttttttagtagtagtttgaagttcgggttggagatgggtattttaagtggaaggttgggaggttgaggattttgcgatagtgatagtaggtgagtagtggatgtgcggtggttggaattttggaagtgggtgttatagttttcgtagtattggagggagggagtaggagatttgtagagaaagaagaaaaagtattaagggtaggggaaggaaaaggggaagagttgaggttttagagggggttggtagggtagaataggatttttttagtttttttgttaaggaataaattgttagttaggtatagtggtttacgtttgtaattttaatattttgggaggtagaggcgggtagatggttttgagtttaggagtttgagattagtttgggtaaaatggtaacgtttgtttttttttttttttttttttgagatggagttttgttttgttgtttaggttggagtgtagtgttatgattttggtttattgtaatttttattttagcgatttttttgtattagttttttaagtagtcgggattataggtatatgttattatgtttcggtaaagtttgttttttataaaaaatatgtttgagtttaggaagcggaggttgtagtgagttgaaattatattattgtatattagtttgggcgatagagtgagatgagtgagattttgttttaaaaaaaaaaaaaaaaaaaaaaaaagggataaattgtttttttttttatttaatagtgagggatttaggttggtttaaaggtggtggtgagttatttgaattaattgtttatttagttatagattaaattttttattttatttttttttttttttttattattgtatttgatttgttttaaaaataaatttttttaaattattgtgggatttagagtagaatagttgaaagaaaaaaatggtaattagatttagtaaatttttgggtaaggggagggatattagttataatgattatagttaatatttatgtattgtatattatgcggtatgtattattttagtattttatatatattaatttattgaattttaataacgatttttattatttttatttttaagatgagaaaattggaatatgtagatattaggttgtttgtttaagtaagtggaattaggttttaaatttagggagtttatgtttataattatttgattatattattttgttaatttatatatgaggataaggaaagaattttttagtattgtgttggggcgtttggtgtggtgtggttgggagaggtagaatataatgagatatgggtttgagttaaagtttttttttatcggtttttcgggttttttgtttttttatggttttttttgattatgcgggttattttagggaagttagtttttttagcgagttgagtcgtatttttgttatttagtttatagatttttatttaggtagttttacggtttaggagatagtttatagttgttttttggttcgttcgagtagtatatattagtggggtttattagaaggtatttcgggcgttgatattttttttagttttttttgttttatgcggttttagtagttttttaagttttggtaggttttttttttgggttgtttttagtattcggtgagttattttatttttagttttaagggattttttttgtttatgtttttttgatgttttttttgttattgtttttgttgttggtgtttttattattttttttttttttttttttttttttttggtaggtttagtttgagatttttgggagttaggagcgttgtttttatttttaattagggttttatagaaagttcgggttgtagttttatttagggtggattttggtttttcgggttgtggttgttgttgtttatttttttagaggtcgttggggttagtggttggggtgaaggtgatgagtaagggtcgggatatggtttttgggagaattgagaaaatgatattaggtaagggaaggatgagataagtaagttaagttcgtggtgattttgtagtaattatagttttagagatttgttgggatgagaaaaagtagttaaaaatatttttttgttattaaagtaattttataatttaggattttgtagggtttaagggagagagattttgcgtaaaaatatggaattttataatatcgattttgttttttagtaaagattaataaaattttatgagattgttgtttagaggttttgcgttcggtttttatttttatttttattaataataaatattagtttttttttgaaattatttttttatttcgtaagatatattagtaggaaaaaaaaattagtttggttttttaagtttttcgcgattttatttcggagttttttttttttaaataaaaatagatgggttattttttagaagatttcggggagagttttttatacgtgttgttgtgtagttttcgtatcgtaaaatggcgttattttaattagaagagttgatataattaaatagttatacggtacgaagacgtatgcgtggcgataataataataaaaattataatttatattatttgagggttcgggcgtgcgtaaagtttcgggtttagtttttcgcgttggaatttttttaatagtaaacgagtaaagtttcgcgcgtttaggtggcgcgagtattaggatttgtcggttggggttttatttttatataacgtttttataatgtttttcgttttttttaacgtggttttcgttttaagtttattttttggagttaggaatttattttgtgggttaggaaaggtttttaggaggcggagggaaatttgtggaatgtcgagaagtcgtgtaatgaaataacgttacgtttgttttttattattattttgattagggttcgaaggttatatttagagtttaaggggaaatggagaagtgtaaagggacgagtagaatggttggtattattttaggttagcgtattgggacgttttagtttttatatcgtttattttattttatttaagtttttacgtacggagttaagtcgtatttttttttttatgaggtaggagttcggaggaaatagtatgttcgttaagggtttttggcgggattgattcgtattaggggtttaataggtaataaggatttagcggattggtcgaggataggttagttttttgggtagtagcgtcgcgtcgggattagaggggaacgtgaggagagttgcggaaagagatttagtttggttttttttttttttcgttttaagttagtttttttatttagtgagtataaaattgtattgtttagattttcgggtttcgaacgttatatttggttttcgttttcggtggtttttcgttgtgtttcgttcgtaagcgttttttttcgggttttcgtgatagttaggtcgtgcgcgggttattttgggattggtagttcgtttttttttatttagttagtttttttttttatcggggatttcgtgtttcggtatttatcgcggtatttgatttttggcgtttgcgtgttgtttttttttttattttttttaatttttattttttttattttatttcgtttgtcgcggtcgggttcgcggtttgcgttgtagcggtcgtcgtcgttttttggaagtagtaatttttttattttattttagttttggttttcgtttagtcggtgagtttgaagtcgtcgttgtttcgagttttttgtcgttgggagcggtatatggggttttcggattttgatgtgggggcgggggaggaagcgattaggttcggtacgaaggagggagaggtggtttgaggagcggaggggggatgtgtggatttcggtgaaagggatttgataatcgtttttaattcgtgagaaaaggaggagttcggtttttgtttgagaatgataaatttggaaatttttgggaaaggcgtgggggttatgtagagatttgtattggtagggagtttgagtcgaggtttttgtcggagttgatatagaggagagagggttttggttttcgggagttttagggatgtgggtcgggttggtgggttaaagtatttgttggttttttttaagtggtgggattttaaagaatgtttaattttaaagaaaaggggttgagatgtaaattagaggagttggagaggagtgttttagagtttgggttgttttaagaaagggtggtttcgaattttttcgtggttggagggtcgaatgtgggaggagggaggatattagaggtagggaaggagaatttgagttttattgatattgttttttttttagt

SEQ ID NO: 28 - DNA, 5942 bp, Artificial Sequence
  chemically treated genomic DNA (Homo sapiens)
gttagaaaaagaatagtgttagtaaagtttaagttttttttttttgtttttggtattttttttttttttatattcggttttttaattacgggagaattcggaattatttttttttaaagtaatttaaattttgaagtatttttttttagtttttttaatttatattttagttttttttttttgaagttaaatattttttggggttttattatttgaaagaagttaatagatattttgatttattagttcgatttatatttttggagttttcgaaggttagggtttttttttttttgtgttaatttcggtagggatttcgatttaggttttttattaatataagtttttgtatgatttttacgttttttttaagggtttttaagtttattatttttaagtaagaatcgggttttttttttttttacgggttgggggcgattgttaggttttttttatcggaatttatatatttttttttcgttttttaggttatttttttttttttcgtgtcggatttggtcgttttttttttcgtttttatattaaagttcggagattttatgtgtcgtttttagcgataagggattcggagtagcgacgattttagatttatcggttggacggggattaggattggggtggggtagggaagttgttatttttagggaacggcggcgatcgttatagcgtaggtcgcggattcgatcgcggtaggcgaagtggggtggggggagtggaaattagggagggtggggaagagggtaatacgtaagcgttaagggttaggtgtcgcggtggatgtcgggatacggagttttcggtagagaaagaaattggttaaatgagagaaagcgaattattaattttaggatgattcgcgtacgatttggttgttacgaaggttcggaggagggcgtttgcgggcggggtataacgagaagttatcggaagcggaagttaggtatggcgttcggggttcgggagtttgggtaatatagttttgtgtttattgggtgaagaggttgatttagggcggggaaaggaggaagttaggttggattttttttcgtagttttttttacgtttttttttagtttcggcgcggcgttgttgtttaggggattggtttattttcggttaattcgttgggtttttattgtttgttgggtttttagtgcgaattagtttcgttagagatttttgacgggtatattgtttttttcgggtttttgttttatgaggggagaggtgcggtttggtttcgtgcgtagggatttgggtggggtggggtgggcggtgtgagaattggaacgttttagtgcgttaatttgaggtggtgttagttattttgttcgtttttttgtatttttttatttttttttaggttttaagtgtgattttcgaattttggttagagtaatggtgaggggtaggcgtgacgttattttattatacggtttttcggtattttataggttttttttcgttttttgagggttttttttaatttatagagtggatttttggttttagaaaatgggtttggagcgggggttacgttgaggaaggcgaagggtattgtgggggcgttatgtaaaagtaggattttaatcgatagattttagtgttcgcgttatttgggcgcgcggagttttgttcgtttattattgaaaaagttttagcgcgggaaattgaattcggagttttgcgtacgttcgagtttttaagtaatgtgggttgtggtttttgttgttgttgtcgttacgtatgcgttttcgtgtcgtgtggttatttgattgtgttaatttttttgattagaatggcgttattttgcggtacggaagttatatagtaatacgtataggagatttttttcgagattttttagggagtgatttatttatttttgtttgggaagaggaaatttcgaaatgggatcgcggaagatttaaagggttaggttgattttttttttttattggtatgttttacggggtgggaaagtggttttagaaagaggttggtgtttattgttggtgaggatgggggtgggggtcggacgtaggatttttggataatagttttatggagttttattaatttttattaaggagtaaagtcggtattgtagggttttatgtttttacgtaaagttttttttttttaggttttgtagagttttaagttgtggggttattttagtggtaggaaagtgtttttgattatttttttttattttagtaggtttttgaggttgtggttgttatagggttattacgagtttggtttatttgttttattttttttttgtttggtattatttttttagtttttttaaaagttatgtttcggtttttgtttattatttttattttagttattgattttagcgatttttggaaggatgggtagtagtagttatagttcgagaagttagagtttattttggatggggttgtagttcgagttttttatgaggttttgattggggatgagagtagcgtttttgatttttagagattttagattgaatttgttagagaaagaaagagaaagaaaagaagaataatgaaggtattagtagtagaagtagtggtagaaggagtattaggaagatatggataagggagattttttgaggttgaggataagatgatttatcggatattgagggtagtttaggagggggatttgttagaatttaggagattgttggaatcgtatgaggtaggaggagttggggggaatattaacgttcgggatgttttttggtggattttattgatgtgtgttgttcgagcgggttagggggtagttgtgagttattttttgggtcgtggggttgtttgggtgggggtttgtgagttgagtggtagggatgcggtttagttcgttgaagaagttggtttttttgaggtagttcgtatggttagggagagttatggagagataaggagttcggaaaatcggtaaggggaaattttagtttagatttatgttttattgtgttttgttttttttagttatattatattagacgttttagtatagtgttgaagagttttttttttatttttatgtgtaggttgatagggtagtatagttaagtggttataaatatgagttttttggatttaaagtttgattttatttatttgggtaaataatttaatgtttatatgttttagtttttttattttagaaatgggggtagtaagaatcgttgttaggatttaatgggttaatatatgtaaaatgttagaatagtgtatgtcgtatagtatgtaatatatgaatgttagttatagttattatgattaatgtttttttttttgtttaagagtttgttaggtttggttattattttttttttttaattattttgttttggattttataatggtttaaagaaatttgtttttaagataagttaagtgtagtagtgagaaggaggggaaaagtggagtaaggagtttgatttgtaattgagtgaataattaatttagataatttattattatttttggattagtttggattttttattgttaagtaggaaggaaggtaatttgtttttttttttttttttttttttttttttgagataaagttttatttattttattttgtcgtttaggttggtgtgtaatggtgtgattttagtttattgtaattttcgttttttgggtttaagtatattttttgtagaaagtaggttttgtcgggatatggtggtatgtgtttgtaatttcggttatttgggaggttgatgtaggagaatcgttaaggtggaagttgtagtgagttaggattatggtattgtattttaatttgggtagtagagtaagattttattttaaaaaaaaaaaaaaaaaaaagtaggcgttgttattttgtttaggttggttttaaatttttgagtttaaagttatttgttcgtttttgttttttaaagtgttgggattataggcgtgagttattatgtttagttggtaatttgttttttagtagaaaagttgaaaagattttattttattttgttagttttttttgaggttttaattttttttttttttttttttttgtttttaatgtttttttttttttttttgtaggttttttattttttttttttagtattgcgagaattgtgatatttatttttaagattttaattatcgtatatttattgtttatttgttgttattgtcgtagggtttttagttttttaattttttatttggggtgtttatttttagttcgggttttaaattgttgttgagggggggttgggagttaggaatggggttgggatttcggggtgagggtcgtgttaattttatttttattgtttttaagagagattaggaaggattaggttatagattagtattttagtttcgagtgatatattttttagtttgggatattcgagttgtggttgggagggagagattttttcgggtggttatattgagttggagggaggagagaaggagggaggagaaagatagggtttgggagcgggatttaaggatttatatgaatttcgagttttgattttggtaaagtttgattttagtttgttgttgaagtttgaatttgggtttttgatttgggttttttgattttttttttttgggatttgtttagatgtagattttgaagtttttggttaataggttttgttttcgtgagagacgggttgagagttagaaataaattaattatttgtggtttatttatttttttggaagttattttgaggaagttaaatagaagtttgggagttatatgtaagttttatttgagttagaaggggtagtttttttaggtggtatgataaggttatttttttgttaatttgggtttatttttaggttttagatttttttgggagttttttatttatttttttaatttttttggattaagaattgtttagtttcgtgtaagttttattttttttaggaggagttttttgattatagttaatttattgattttataaatataagtttatatattatgtgttaagaatataggtaaagatatttttaatttttaaagagtttatagttggagagggaaagtgttatgttattaattttttttttttttttttgagatgtagtttcgtttttattgtttaggttggagtgtaatggtatgatttcggtttattataatttttgtttttcgagtttaagggatttttttgttttagtttttttagtagttgggattataggtatgttttattacgtttagttaattttgtatttttagtagagacggggtttttttatgttggttaagttggttttgaattttcgattttaggtgattcgtcggtttcggttttttaaagtgttggggttgtaggtatgaattattattttcggtttatgttattaaatattataatgtagggtgataagggaagttaaggtttttagagatgagaatgggtagggttttgttggaagaggttagtgtgataggagggtttacgattattaagtttgtatatttagttgaattgggattagaattttagtttttaaatttaaattttaagttaaatttttttgttttatttatttgtttatattttttttttttatatttttttatttttttattatttatttttttgttttgtttatgtcgggtggtaggtataagaagagtttattgttgtgaaatttaggaatttaaatttgtagacgggtaggggagggttgtttaagtcgtaagattttttatttttttttttttgggaaagttttttatgaagttttggatgcgaaatggaggagtggtgggggatgtggaaaagaatttaggggtagggggttgtagggggcgatcgagtttagggaagtatgagaaattcgggaaaatggggagttgggtttatattaaggttttggtttttg

SEQ ID NO: 29 - DNA, 2580 bp, Artificial Sequence
  chemically treated genomic DNA (Homo sapiens)
gaattcgagtttataagtttttttaaaaaaaattgatttaagtaaattttgggaagagtttttttgttatataatttaaggttttaaggttttcggatttatatattttataaatgaattagttagtttgtttaaatgtagggaaattgtgggaagaatgttttttttatttaatttaaggttttaaggtttttttaattaattttattagttaattagttaattatttaaaaataaaagtttgaaattgttaaaaaaaaaagataaggaaaaggaaagaaagaaagttattagtttgtttggtatataatatttaattgttgtttgatttacgtgtgggttttagatgtagatttttagtttttagttttttagagattgatattaggtttgttatacggtttaaaatgatgagtatatttatgaattttaattttatttttttttagatttttttggttaagaaattatgtagtttgtatgaagtaggtatttaaaatatatttgatgatttaatttttattggagaagaaatatttatatatgtttttttatttttatatgttttaaatatgtaaagattaaataaatatttttagaagtatttaaattttttaaagtaaatttattttaattagtaataggatttttttaatattggaaagttgagtgtgatcgtatttagtggtgataagtgtgagtttgtttggggagagggtaggatatttaggattttttaagtttagagttaatataataaagattattgagtgtttatttgggtgggttataattattgtttataggagtttatgaattataagtaaaagagtgaggagatatgattagtttataaataatttttaatatagagtagaaagtaatgaattattgtaatggagttattatagtgttaaggatgtttagagggtatttttgataggtagaggtgagggttagggaaggaagttgtagtttagttagttagagttgttggaatagatatgataatgttgttgttaaattgtttttttttttgaggatagaatgtttcgtgtaagtggtttggtggaagggattagtgttttaatatagggtgatttataagtaggaaagtgtgttttagaaatttagattagagtgatagattgaattggattatgggggatttatttgaatgttatttattgtattgtttttgcgattagtgttagtaaagtgttaaagggattgagtagatgagtgatattatgtaatataagttttgagttttatttgttagattgattggagaggggtttggttagttataggaaggtaatttggtatgtagttattatttttgagttgatgtaagtttttttgtatggagagttggttttttttattttgtgggaaaagagaataaaggagtatgggagtgtttaagggaaggagaaataaagggtagagaggtagcggtggtgttagggaagtttataggagttaatagtagggttgttttaatttagagaggaagcgatttggtgttttcggttttgtggttttttttatttaataatattttttattttataataatgttagggaaggcggaggttggtatagtgtattaagatatagttatttttgggtgatagaggtttagggtagtttattaagtaggtagaagtttttgatatatattttgagagataaagtaagattttgtattttaatttttagaattttttttattatttattatagtttcggagttatatagtttttattattttattataattttagaatattagagaatatattattttatttaattattttttattatatgtgaaaaaaatgaaggatatgggggaagtgtgatttgttttaaattatatattttatggtagagttaggttttttgtttgttatattagtgttttttttgttataattattttgaagaatttattttttagtaagaaaatatttttatggagagtagttggaaaatagttgagagatggaggggaggttgggggtgtggagaggggaaggggtaagtgtatagattcgttgaaggggggagaaaaggtcgtggggatgaagttagaaggtagaagggtttgttgggtttggtatgaaggagtatgagtttattgagttttttttggtttttttatgttagtaatgtacgtggtttagtttgttgtggtattggttagtagtcgaggtatcgttagttttgtgtgtgagtatgtatttttaggtaaagttattgaggttcgggtgatagtgtttcggtaggttgatagttaggtgattgaagtttgtgcggtaatttatatgatggggaatgagttgatttttttagatgattttatttgtacgggtatttttagtggaaattaagtgaattttattatttaaggattgagggttatggatacgggattttatatttgtaaggtggagtttatgtatttatcgttatattatttgggtataggtaacggagtttagatttatgtaattggtgagtaaagttattttattgagttgatatttgttgtattgtagttttttatgtat

SEQ ID NO: 30 - DNA, 2580 bp, Artificial Sequence
  chemically treated genomic DNA (Homo sapiens)
gtgtatagaagattgtaatgtaataggtgttaatttagtgaaatggttttgtttattaattatataaatttgggtttcgttgtttatgtttaggtagtatggcggtgggtatatgagttttattttgtagatgtagagtttcgtgtttatggtttttagtttttggatagtgaggtttatttgatttttattggaggtgttcgtgtagatggaattatttaggaaggttaatttattttttattatgtaggttgtcgtatagattttagttatttggttgttagtttgtcgaagtattgttattcggattttagtggttttgtttggagatgtatatttatatataaagttggcgatgtttcggttgttggttagtattatagtaggttgggttacgtgtattgttagtatggaaaagttaaagggaatttagtgaatttatgtttttttatgttaagtttagtaagtttttttgttttttagttttatttttacggtttttttttttttttttaacgaatttatatatttatttttttttttttttatatttttagttttttttttattttttaattgttttttagttattttttataaagatatttttttattgagaaatagattttttaagatggttgtggtaggaagaatattgatatgataaatagaagatttggttttattatgaaatatgtgatttggggtaagttatattttttttatgttttttattttttttatatatagtaagagataattagatgagatgatatgttttttggtattttaaggttatgatagaatgataggagttatatagtttcggaattataatgagtggtaggggaaattttgaaggttgaggtatagaattttgttttattttttaaagtatatgttaaaaatttttgtttatttagtgagttgttttgaatttttgttatttaggagtagttgtgttttgatgtattgtattagttttcgttttttttggtattgttgtagagtggaagatgttgttagatgaaggaagttatagagtcgagggtattaggtcgttttttttttaggttgaggtaattttgttgttaatttttgtgggtttttttgatattatcgttgtttttttgttttttattttttttttttttgaatatttttatgtttttttgttttttttttttataggataaaggagattagttttttatatagagaggtttgtattaatttaaaaatagtggttgtatgttaaattatttttttgtaattaattaggtttttttttagttagtttgataagtgaaatttaaaatttgtgttgtatgatgttatttatttgtttaatttttttgatattttattaatattgatcgtaaaaataatataataaataatatttaaatgagttttttatgatttaatttaatttattattttggtttgaatttttaggatatatttttttgtttataaattattttatattagagtattagttttttttattaagttatttgtacgggatattttgtttttagaagagaaaatagtttggtagtagtattgttatgtttattttagtagttttagttagttagattatagtttttttttttaatttttatttttgtttattagagatgttttttgagtatttttagtattgtgataattttattgtagtagtttattattttttgttttgtattaaagattatttgtgagttaattatatttttttatttttttatttgtggtttatgaatttttgtgagtagtgattatagtttatttaagtgagtatttaataatttttattgtattgattttaagtttaagaaattttaaatgttttgttttttttttaagtaagtttatatttattattattaaatgcggttatatttaattttttagtattgggagggttttgttattggttgagataaatttattttaggaaatttaaatatttttaagagtgtttatttaatttttatatatttaaaatatgtaaaaataagaaaatatatatgaatattttttttttagtaaaaattaaattattaaatatgttttgagtatttattttatataaattatatggttttttagttaagaaggtttagagagagataaggttgagatttatggatatatttattattttaagtcgtgtaataaatttggtgttagtttttgaagagttgaaaattgaggatttgtatttgaaatttatacgtaggttaggtaataattaagtattgtatgttaaatagattggtggttttttttttttttttttttttgttttttttttttggtaattttaaatttttatttttaaataattggttaattagttagtagaattgattaagagaattttaaaattttgaattaagtaaagaaggtattttttttataatttttttatatttaaataagttggttaatttatttataaagtatatgaattcgaggattttaaaattttgaattgtatagtaaaaaaattttttttaggatttgtttaagttaattttttttaaaggaatttgtgagttcgaattt

SEQ ID NO: 31 - DNA, 18997 bp, Artificial Sequence
  chemically treated genomic DNA (Homo sapiens)
atatttggtgatttttgtatttgatggattagttggtattatttagattgatgaattggtttatttgattttgtagcgttttttatttaggaatttagggtaagaagatagttttgattttttatgattttattttcgattattaggattcgtggtttattggtttttttaattaagttgtttttaaaaattttgattttcgaatgtttggggagattgatttgagtaataataaaatttcgtttttttgtatagttggttgtgtatgaattattttttttttattttaattgtttagttttgatgaattagttttgtttaggtagcgggtaaggtgaattttttgggaggttataaattttttttttatgattgtaagttattattgagtattttaaaagtaggtggagttgataaattgatagtttaggtttggtagttatagattatttttgttttaaatgggtattattgttatttgaataaattgtgaataaggtatatttttttgattgaatatagaaatgagtggaatagtttataagttgttttgtttaatgatagttattagttataagtggttatttagatttaaataaaagttaaataaaatttttttagttatattgtaattaagtatttttatttttttaagagatagtttaatgatttttaaaaaattttttttttttttttttttttttttattttttttttagttttttagaaatgtaattgtagttttttattttttttttattagatattttttatggggtaggtttatttaattatgtgtttagaagttttagagaggaatttttatttatcgggaggttgttttgagagataatagtttatttataatttaaagtatgtttgttataaagtttttttttatttggagagttttggttatttttataatttagttttgtttataaaaggtattagtagttattgtttagtagataaggtattgaaggtagtatgtagattttttaattattcgtttttttttttcgtgttatttatgttagtattttatgttttattttaaaagtattttttttttgttttaaaagtgaaatggtatttttaaggtagaaaattagtatttttttttttaaggtagttttggaataaaatattattttttttatattagattttatttttgttaagtggattttgtaagtagcgagagagtgaatttgtatttgggttataatattaattagtttaagtgtttaatagttatatatgtttagtagttattatattgggtagtgtagagatattgttatagaaaattttattgtatattgttgtttaggtattgatgattttagttttatgttgtggtgagtgatttgtttttggaaaggataatatagtggatttattttcgggtgttagtaagggggtaaaattgaggtttttttgagatttttaaatagttaggagggagggaaattagataaaggagttgaaaagttgttttattttattagaaattgaaaggatgaagggatatgggtttattgaagatatttattgttttattaggatttgattagaaatttgatattttaaaaatttgattttgtgttgtttgtaatttgattttttttaaatttttatttttgaaaataataatttattttatttgttttattaggaaataaggagagggggttttggttatattggggttaaagtttagaaggtagagattatatatgtaatagtagttaatagaagtaaagaggggaattttaaggtaaacgtgataatgtaagggaaaggaaatggaaaagatatttttttttatgcggagattttttttagaagagttattgtttatttaaattttggaggatttgtgttttttttggtaaataatgtgatttttttttgtagaggatgtatgatgtaaaattatggattttgtttttaagggaatttttttgtttttttatttttttattgttttatgtaatgaaatttttaaagtatattttgattttagttttagtttataaattagatttgttttttaagagttatttgagttgtagtttttttagtgttattttttgtatatttaaattattgggggcgttgtagtttggttaatttttaattatttagagaattaggagaagtagatatggttaattattaggattaatgatagttaataagagtaaatatttattgaatatttattgtttgttaaatattatgttaatagtttaatgtttaatattattttatttaatttttatataattttaatgagttaggtattgttatttttgttttatagaaaaggaaaatgagattgttagattgagtaatttgttttagattagataattagtaaatagtagaattaaggtttaaatttaggattgtttgattttagagtttgtatttttatttattattttggataagaattttaaattatattaatattttgatttaaattaattgaaattaatattagtgttagtaattttttattgatagattagttaaaaatgttttaatgattatagaattataaattgaatagagaagtaggtttttttttgttgttttaagtagtttagaaaagttttagtgtagtatattggtgtgattagtaggttttagaaataaatgtatttaataagtttatttggtgttttttattttttttttttttttgtgagagtttttggggagattttaatgatgatagttgatatggattaaaggtagataaaatataagggagaaaatattggaaggagtttggttgatggaatagaaattttttgaagaatttatatttgaatgattaaaaagtattagtttagtttgtaaagtttgaagttgaatattcgtgaggaagttatttttttatttgttgatgaggtagagagaaaggtttaatttgttagagaaattgatgttttttgttatattatattgaaataagaattagtttgttatttatttttttttttttttttttagtaatataggtttaggttgaatttatgtttatatagttgtataaatttttacgggtatgaatataaatttatttatttaaatagattttaaaggttttttaggttattttttttttttttagaatttaagtaaggttttgattattattgataatatattcgttagttaatgcgtgtagagtttttagtttaaaggtaaataaaaagtgaaaaggggtcggcgtagtggtttatttttataattttagtattttgggaggttgaagtaggtagattatttgaggttaggagtttaagattagtttggttaatatggcgaaatttcgtttttattaaaaatataaaaattagtcgggcgtggtggtaggtgtttttaattttagttattcgggaggttgaggtaggagaatggtttgaatttaggaggtggaggttgtagtgagtcgagatcgtattatttattgtattttagtttgggtgataagagtaaaattttattttaaaaaaaaaaaaaaaaaaagtgaaaaggtaggaacgttgttgtttatttgttgttttaggaattttgtttacgtatagtttaaaatattaagaagttgaaaataaagtatttggttatgtgtggaaaaatttatagttaaaaggtgagatgaattgggtttagaaggtcggatttacgtgaaattaaaagggtaacgaaagttagaatttaattttttaaaaaaagttaaaataggtcgggtgtagtggtttatgtttgtaattttagtattttgggaggtcgaggttggcggattataaggttaggagttcgggattagtttggttaataatggtgaaatttcgtttttattgaaaatataaaaattagtcgggcgtggtggcgcgtgtttgtagttttagttattagggaggcggaggttgtagtgggtcgagatcgcgatattgtattttagtttggtcgatagagtaaggtttcgttttaaaaaaaaaaaaaaaaaaatagttaaaatttttaaaataattttatttgttaaaatataaaatttgaaattattttagttttttttgtaaaatgagttggagagagtagggttgaattaggtatgttttttcgggtttttcgacgttgatatttcgggatattatattaggtttaagatattagtttgcggaaagagagttgttaaatttgattatatgttttttgtacgatattcgatagttgtttttttttttattagtttttttaaggttgtaaatatatttgatttacgtgagagtttttataagttagtataacgttaggttttaaggaggcgtttaataaatgttggtattgtagggttagatttcgagttttagtttagaattttgttgaggttaggttttttttttgtttttcgttttttattatatttatttatttttttaagtaattaagtttaaattggggtttgtgtagtgattggtcgcgtcgggttttattgcggatgaatttgatttgttttaatgatttgtgatagatatttgtagatagcgtttttaatagaattagggttaggttggtattaaattttaggaacgttaggtattgttttaaagtagatgtaaatcgttaaattttttaggatttagaaggattagagagagtcggatatttttggttagttacgcggtttttagtaaagtttattttttttttttttttagtgtgttttgttgttagagtaattgtgggcgttatcgagttgacgggcggaaatagaatagaaagagtatacgtttttagtttattgatagggttattgcgtagacgtattaatttttttgagttgtagttgagtttgttgatgtagttcgcgtttgcgtattagttgttacgcgttttggtcggttttagcgtttgcgtaaattggtatatcggggagggcggagttaggttacgagggtgcgtatgcgtaaatagtatattcggtgtggtcgacgggttttttaagagtttggggcgcggattggagtattttgcgtgtagttatgtcggcgtcggtagtgtttgttatttcgcggtttttagaagagtatttgagttttatttcgtagcgtttgaagttgttggacgcgtatttgttgtatatattgttgatcggggcgttgtagttcggttattgttttttcgtggggatttttttttttaatttttttttttcgggttttattttttgtgtggggagttttattttagcgggtaatggttttataagtgattataataataatgtgttattttggtgtgttgtttttgtttttatagtattttatattagattatcgttttttgaagttatgagaagagtttgtattgtttttttgttgtgaatggggaaattgaggtttagaaagtttagattatatgtttaatattaaacggtttcgtaggagttggatttaaaagtttaaagaaattattttcgtgtcgttattttatttggtgatttattttatttaatattggttcggggaaaattttattttaattttaatttaggtttaatataattttaaaattagtagattttttaaatgaaaaatttaattttgaattatttttgttattttggtttaattattattaattttcggtgaaacgttttaatgaaagtgtaaagaatataaatattggtgttttttttgttgaattattttttatttgattttgttttttagttgttattatttttttttttgttgaggaagttgttattttattgttttgaatttaatttttgtttatataattttattttagttttatttttttttttgattttaggatttggtaattttgtagattgttatatttagcgagaatagtttttattaatttttgttaaaatttgattttttttgtttaacggggatttagtgaatattgaaaataggcgtggtttttattattggtattatttgttattttgattttgaaaatatgttagtatttatggtttttttttagtgtgattattagttaggttattagttgtatttttagtttaatatgaggtattatggtaaaagttttggtatatgttttttattcgtaaagagtttatggtttagttggggtatagataaaatatagtattggaattgtttggaggtttggtatagtggtttatgtttgtaattttagtattttgggaggtcgaggtaggtagattatttgaggttaggagtttaagattagtttggttaatatggtgaaattttatttttattgaaaatatataaattagttaggtatggtggtatatatttgtaattttagttattcgggaggttgaggtagaatcgtttgaattcgggaggtggaggttgtagtgagtcgagatcgtgttattgtattttagtttgggtgagagtgaggtttagttttaaaaaaaaaaaaaaaaagtttggtgatagtggtgttgtgtttaaagttatagatttatagaatgtttattgtatatttatattgttttgatatattagagatattttttagaatttaaaataggtttgaggatttaatgatttgtgtattgaagttgtagattagttttttgattggatatttagttattatttttgatttttgttttagatgattaagatttagttgtttgtggtggcgtttttgtttttaggatgtgttaattattattcgattagatatattatttttttgttttaagtattttttattatttatttatcgttttttgttacggtattatatgtttttattagttagttcggagaaggaattttgatgagaatttttgatttaattttgtttgatgtttttgtttttaggtttggaagagtaggagtaaggtagggtttgaaagttgattttaaaaaagatgttttttttatgtagaagttattttgtttttataagtttttagggtttagaatgattttttatggatgttttgaagaatgtggtttgttgaagagtgggtatggattagagttatagattattagtgtaataaagttagaaggtttttttgagtaaatgatttttatttatgttaagatttgtttttgagttcgttgtggttgaaattgaattggtagattggattgttttttttttttttagtgggaattaggtggtttgttattgaagaaaaatttagtaaaagggtatattagtaatggggttaataagggggattaggatttttagatttgttagataatagataatagagttatagaaatgaaagtaattttaagaaaagaagggatttatgataatttttagttgttatagaagggtatgatttattttttttttgatagtattgatttttttaaattttgttttttttgttatttgttagtttagattattaattggagattggttttaatgggaaatttggacgtttattttttgttttgattgttggtaaaggtagttttgtttttttttatggtgttggggtttttaatttttttgtggaattttttgttgtaagagaatggaggagtttagtgagttgggagagggaaatgtaggcgatattgttgaaggattaggtagtgttgggtgttagatgtttgaatgttaggttaaggaatttggattttttttgagatggagttttgttttttttttttaggttggagtgtaatggcgatttcggtttattgtaatttttgttttttaggtttaagtaatttttttgttttagttttcgaagtagttgggattataggtatgtgttattacgttcggcgaattttgtatttttagtggagacggagtttttttatgttggttaggttggttttaaatttttgattttaggtgattcgtttgtttttgttttttaaagtgttgggattataggtgtgagttattgtgttcggttaggaatttggattttattttgtaggtaatagtaaagtttttgaagatgtttttttttttttttttgagacggagtttcgttttgttttttaggttggagtgcgttatttcggtttattgtaagtttcgttttttgcgtttacgttatttttttgttttagttttttgagtagttgggattgtaggcgtttgttattacgtttagttaagtttttgtatttttagtggagatagggttttatcgtgttagttaggatggttttgattttttgatttcgtgattcgttcgtttcggttttttaaagtgttgggattataggcgtgagttattatattcggtattgagggtgtttttttaaagaaaggaaaagatttaaaattggtgttagtatgtaggatgaattggagggaaatgttttttaattttttttatttttttttggtagtttatttttttttattttttttgtatgtgttagtttagtatatgttttttggaaattgattagtatattttaaattaatttagaacgttattaaatttttaaaaaatttgttgttattgggtttgatggtatgaaaatagtttgtttttttttatttttttatagttgagagatttaattatggttttaagaaggaattagaggtagaaagttgttattgagagatttttttttgtgtgtgttttggattattagagtataatatattggttttaaaaggattttagaggtagaatatttttttatttgagatagattttaaatatttagtagttgattgtttattttgtagttagatatttttagaagaggatatttgttttttttttagagttatattttagtgttggtaattttttagtttttttttttgtttaattgaaagttgtgtttatttaaagtgttatttaggagggataagtagaaaatattaagattgtttttaaaataagtttttggttttgaaataagttttaatttattttttaatttttatttgttttgttttttaatttatatgaggtaattttgttttaaaaaatagttttgttttttttagtttataaatttaaaattagtttgaatttgtaaggtaaggaggtttagtttagagttttttgttttacgggagttattaggttgttgtggattggggtttagtattttttttggaattatttattagatttgtggattttaatattattttttataattgttattcgagagattagaagtttgttatttatgtgtttgatagttttgtttttaaatattttttatattattgttatttttttattttttgttttagttttttaatattttttatgaagattattgtaattttttttattggtttttcggtttttggtttttagtttattttttattgtgtttgtaggtttgatttgatttgtaaatttgattgtgttatttttatgtataatttgtgttttttaaagtaaaattaaaattttttttttgatatataggtttttttatgatttggttttttcgttgtttgtagttttattttttgtttttgttttttttatattttgttttaatagtattgagttatttgttattttttgaatatttttatgtgttaaattatttgtttttgtttgattgtttttaaaatttttttattttttagattttttagtttaagtgtaatttttttttttttttgttattgtttttaaagagaataaggttttgttatgttgtttaggttggttttaaattttttggtttaagtagttttgttttagttttttgagtagttaggattataggtatatagtattatgtttggtttattgttttttggaatttttttttgattttttagtagattgaggttttttttttgtattttttttttattttgtatgtgtgtgtgtgagagagatatggtattgtgttgtatttgggtgtttgttttttttttggaaggtgagtttttgagggtaggggttgtttttttatttttttatttttagtgttgaatattgtatatgttaaatggtgagtaggtttatagttatgttaggaatagtgagtaatgatgtgttaggttttttgttaaggtgttgggaatttaattgtgaagtatatagacgtggtttttatttttatagagtttgtaattagtgggaaatatagataagtaaatatggatatggtgttgatggagaattattggtgagaatgggaatataatgtgtatttaattttgtttagtggttttgtaataatattttttttatatattcgtttttttaaagtaggttttataaattattttattttttttttttttttttatttttagttggtgattttgtttttatttttttattaaaaaaaagaagtagataagaatttttttatttttttattattgaattataatagattatttatttttatatttatattttttgattttttatggtggatgatgtgttttttttttgtgaaagttttgtttgtgtagaggatttagtttttttttgtttatttagggatttcgtttttgtaattatttttttgtttcgtgttattaatttttgttttttttttggattatttttattatataaatatgttttaatattgtttatttaaaaaaaattcgtttgattatagataattttttagttattattttattttttttttattattatagaattttttgaaagaataattaatgtttttatttttttttttaattatttattttttaatttatttttggtattggtttgttttcgttattttattgaattattttattgaaattatttttgttatgttgtaacgtttagtatttaatgtaggtattggtttttgtgtaaaaggaaagtttttttttgaatataatatttttttgtttgttttgttttattttattgtttttttttttttgttgttttgtgttgggcgtttttttgattgagagtatggttgtagatatttttattttgtatttttttttaaatagataaatttaaataatatttgtatatttataattatttttttatatttttagttttgaattgtttttcgaattttaaattagtaaatttagttgttaatttgatgtttttatttgatgtttgatatgtattttgaatttaatatgtttaagattaaatttgtttatttagttatttgtttttttattagttagtacgtggtgttaatgttggttgtggttttttttttttttttttttgagatatagttttattttgttatttaggttggagtgtagtggtataatttcggtttattgtaatttttatttttcgggtttaagtaatttttttgttttagttttttgagtagttgggattataggtacgtttttttatgttcggttaatttttgtatttttagtagagacgaggtttcgttatgttggttaggttggttacgaatttttgattttaggtgatttatttatttcggttttttaaagtgttgggattataggcgtgagtcgttatgttcggtcggttgtgtttttaaatgaagaaatttaagttttcggggttttttgattttttttattttttgtatttgttttattagtaagttttgttttttttaaaatatagtttgtatgtttttatttttgtttatttttattattatttttttgagttttttgggttttaagtaatttttttgtttttttttattttttatatttttgagacggagtttcgttttgttgtttaggttggagtgtagtggcgcgatttcggtttattgtaagtttcgtttttcgggtttacgttatttttttgttttagtttttcgagtagttgggattataggtattcgttataatgatcggttaattttttttttttttttgtattttttagtggagatgggttttattatgttagttaggatggtttcgattttttgattttgtgattcgttcgttttggttttttaaagtgttgggattataggtgtgagttattgcgtttggtttatttttatttttatttttatttttttgagacgtagttttattgtgtcgttaggttggagtgtagtggcgcgattttagtttattgtaattttcgtttttggagtttaagcgatttttttgttttagtttttttagtagttgggattttaggagtttgttattgtattcggttaattttttgtattttatttttagtagagatggggttttatttttttgattaggttggttttgaatttttgattttgtgatttatttatttcggttttttaaagtgttgggattataggcgtgagttattgcgttcggttttttgtttttttttaattttgcgaattattatattgttttatcgtttttataattgaatttatattgttttttgaggtttattatgttttttaggatttggtttttgtgtttttttttttgattattatagttttgttggtttgtttttgatttttttttttttttttttttttttttgagatggagttttgtttttgttgtttaggttggagtgtaatggtacgatttcggtttattgtaattttcgtttttcgggtttaagcggtttttttgttttagttttttgagtagttgggattgtaggtatgtattattaagtttggttaattgttttgtatttttagtagagacggggtttttttatgttggttaggttggtttcgaattttcgattttaggttatttattcgtttcgattttttaaagtgttgggattacgggtgtgagttattatgtttggcgtttgtttttgtgtttataatatgttaagattgtttttattgtttagaatgttttgtttttagatttttatatggttggttttttattttttaaatattggttttaaatagtaagtttttaaagagattttttgttatgattgaatttaagaaaagttttttagttattttttattattttgttttattttttttatagtatatatttttatttagtagtttttggtttatttgttaatttattgattatatgtttttttttataggagtgtaagttttttgagagttagattgttttgttttgtgttatatttttagtatttgaaatgatgtttgttatgtagtagatgtttagtaaatattttatggaataaatggatatttaaggggatagagtaaattagaattgttaaaatggaatagattgtttgaagaggtagtaaatttttatttttggaagtgtttagggagagattgaaggattattggtagtggagtattttgaataggtttttttttttgttttttttgtttttaatgtatttgagagatgtgatatttttattagtaatataggttttggaaagttgataattttttatttggaggtggtttattagattttgtaagtggtgagtatattttggaaagttttttacgtgattagtacgtttttttaagtatggttattttttattattttttgggtattgtatatattaaatggggtgttggtgtttatgatttttgaggttttttttaattttgtgggattttgatttatatgtttttattgaaataatttggttattatgattataataataataatattaatttattattttatttatttttatggataattttttttttttttttttatatttttttaaaatttaatatcgtgttttttattttaatgattattattaatagttttttatttttttagatttttttttagattttaattgaaatgataagataattatgtatattattatatgtaaataaaatattttattttttttttgagacggttttgatttgttttttaggttagagtgcggtggtatgattgtggtttattgtagtttgtaatttttattttttgggtttaagtaatttttttattttagtttttcgagtagttggggttataggtgtgtgttattatatttggttaattaaaatattttttttgtagagatagggtttttttattttttttaggttggttttaagtttttgggtttaagcgatttttttattttggttttataatatgttggggttatagttgtgagttattatgttttggttaagtgaaattaggaatgggttgggtgtgggggtttatgtttgtaatttttatttttaggtaagtagaggcgggaggattgttgggtaatatagggagattttgtttttattaaaaataaataaaaaaattagttaggtatggtggtgtatgattgttgttttagttatttagggggttgaggtgggaggattgtttgagtttaggaggtcgaggttgtagggagttatgattgtattattgtattttagtttgggcgatggagtgagattttgttttaaaaaaaaaaaaaaaaaaaggattggtttttttttatttaataagttttagatatgtttgttgttaatgtatagagaatttattttatttttttgaataattgtatgggattttattgtatgttagttgtatagtttaatttttttgatgtttagattgttttaattttttttttaattttataaatatatttttagaatgtttttgttttgtaagataaatttttttgttaaaaggtaaaattattttaaatattaatggatattgttagttgtttttttaagtggatgaatgaatttgtattttttatagtaggggtttatattggttatttttgttttagttattgtttttaatatttttaagggtttggatatttgaaaggattaatggtgtttttatggtgtttatatgtttaagtataatgaaaattgttgttatggtgataggttttggagaattagtttgatagttttttggtttttggattagatttgtttgttgtttttttttagttaatgatgggatgatgttagtttgaagcgagtttaggtttttttaagtaatgtaataatttattataggtataaagatatttcggaagagtgtatttttggaattgtttgtttttttttttttgttaatggtgattgttagaatttttaaggggatggagtgtggtagtggagagtttttatgaattattttttttaggttttttgttttttttgagataaataagtagttgttagaatttcgagattaaagatagtttatcgagaattgtgaggtttttaagaatgagcgtgttatttttataaattttgttatttattaaatgaatattttattagaaaataatttatatttttataattttttattatttagttcggattttttgttgttgttttaagtgtatttttatttaggtataattagaaatttttaaattagtagataagagagttttgtgggttttttggttatatatttttttttttgagaaagtttttaggttttagtgtaattttgagaagtaatatttttttttttttaatagagtgcgaaatttaattgtataatttgataaatttttaaatgtatttgtttaattattatttagattaagatgtaggatattattagtattatagatgtttttttgtatttttttagttattttttttttgtgaaagataaaaattattattttgttatagattggttttattaagttttaagttttttgtatatggaattatatagtatatatttttttgttttgttttgttttgagacggagttttttttgtttaggttggagtgtagtggcgtaatttcggtttattgtaatttttattttttgagtttaagtaaatttttttgttttagttttttgagtagttgggattataggtgcgtgttattatgtttagttaatttttgtagtttttattagagatggggtttttttatgttggttaggttggttttgaatttttgattttaggtgatttatttattttggttttttaaagtgcggggattataggagtgagttatcgtgtttggtttttgttttattttttaatttttttttttttagatggagtttcgtttttgttgtttatgttagagtgtaatggtacgattttggtttatttttatttttatttttattaatttttttgttttattgttttagtttgttaagtaattgggattataggtatgcgttattatgttcggttaattttgtatttttagtagataaggggtttttttatgttggttaggttggttttgaattttcgattttaggtgattcgtttgtttcggttttttaaagtgttgggattataggcgtgagttatcgtgttcggttttttttttgtttgtttttggttaagataaaatatgataaaatttattattttaattatttttaagtgtatagttttgtggtattaagtatatgtatattgttgtaaaattattattattatttatatttagaatttttttgtttttcgtaattgaaatttagtttttattaaatagtaattttttatttttttttttgttagtttttggtatttattattttattttttgtttttaggagtttgattatttttgatgttatataagtgaaattatatggtatttgtttttttgttatggtttatgttatttaaaataatgtttttaagatttagttatgttgtagtaggtattagaatttttttttttttaaggttgagtattttattgtatgtatatattatattttgtttattcgtttttttgttgatatttgggttgtttttattttttggttattgtgattaatgttgttatgaatatgggtatgtaaatattgtttgagagtttggttttattttttatttttttaattttttagatggagttttttttttgttatttaggttggagtgggacggagtgatgtcggtttattgtagtttttattttttgggtttaagcgatttttttgttttagtttttttagtagttgggattataggcgtttattattacgtttagttaatttttgtatttttagtagagacggggttttattatgttggttaggttggtttcgaatttttgatttcgggtgattcgtttggtttagttttttaaagtgttgggattgtaggtgtgaattattgtgtttggtcgagattttgtttttattttttttggatatgtatttagaagtggaattgttggattatatgatatggtaattttgtttttaatttttttgaggaaacgtagtattgttttttatattggttattttatttgatttttttatttgttagtgtataagggttttagtttttttgtatttttgttaatttttgtttttttgatattagatattttaatagatgtgaggtgatatttcgttgtaattttgatttgtattgttttagtgattaatgatgttgagtatttttttatatgtttgttggttatttttatattttttttggggaaatgtttatttaagttttttgtttattttaaaatttggttattattttgttgttaattgtattgtaggggtattttaatatattttgatattaattttttattagataagtgatttgtaaatatttttttttatttcgtaggtgtttttttattgttgtgttttttattgtatttttattatagaagttttaaattttgatatagtttaatttatttatttttattttgttgattatatttttggtgttatatttaataaattattgttaaatttaatgttataaaatttttgttttgtttttttttaagagttttttagtttttggtttttatttatttcggatttaggtttttgattcgtttcgagttaatttttgtagtatatggtataaggtaagggtttagttttatttttttgtttatggatatttagtttttttagtatcgttggttgagaagattgtttttttattgagtggttttgttagtttggttgaaaattatttgattttgtatacgagggtttttgtgtgttttttaaaaaataaagtaattaaattgatttattttttaattgtagtaaatgtatttttaaaataaatttataatggaaaatttgaattattatttttaaatagaaggttatattaaaaatattatggagttaggtagatgtgtttattcgtgtttgtggttttagttgtttaggaggttgaggtgggaggatcgtttgggttttagttcggtttgggtagtattattagattttgttttttgtcgagtttttagtggttttgtgtggttgtattttagaatattttttatttaattgagggggtatatttgtttttttagtatatatatttaggttttgttttgtggtttttgtgtgggagttgggtttttttgtttttggttttttttgggtatttgttaggttttagttggtttggttagttagtgtgtattttttaagttttgttcgggtacggtggtttatgtttgtaattttagtattttgggaagtcgaggtaggtggattataaggttaggagttcgagattagtttggttagtatggtgaaatttcgtttttattaaaaatataaaaaattagtcgggtatggtggcgtatgtttgtagtttcggttatttgggaggttgaggtaggagaattgtttgaatttagtaggtggagattgtagtgagtcgagattatgttattgtattttagtttgggtgacggagcgagattttgttttcgattttttaaaaaataaagtttttgattgtgttgtttaatttatttgtgtaatttatttatttttgtgtatagtagaagtttttttttattgtagtataatattttattgtttgtatatgttataatttatttattttattgttgatagatattagattgtttttagtttggggttatttgggtattatttttgtgtatgttttttgatgtatatatgtatttatttttgttagagtagaattgttgggttttcgggtatgtttgtgtttattagtatatttattttatatttttatataattatttttttgtgttttgttttttgtgtagt

SEQ ID NO: 32 - DNA, 18997 bp, Artificial Sequence
  chemically treated genomic DNA (Homo sapiens)
attgtataagaagtaaaatataaaaaaatgattatatagaagtataaaataaatatgttaatgaatatagatatattcgaggatttaataattttattttaatagaaatgaatgtatatatatattaaagggtatatatagaaatgatatttagatagttttaaattggaaataatttaatgtttattaatagtaaaatggataaattatagtatatataaataatagaatattatattgtaatgaaaaagaatttttgttatatataaaaatggatgaattgtataagtaagttgggtaatataattaaaaattttattttttggggagtcggggatagagtttcgtttcgttatttaggttggaatgtagtggtatgatttcggtttattgtaatttttatttgttgggtttaagtaatttttttgttttagttttttaagtagtcgggattataggtatgcgttattatgttcggttaattttttgtatttttagtagagacggggttttattatgttgattaggttggtttcgaatttttgattttgtgatttatttgtttcggttttttaaagtgttgggattataggtatgagttatcgtgttcggataaaatttaaaaaatatatattggttggttaaattagttggaatttggtaggtatttagaggaagttaaagataaaaaagtttagtttttatatagagattatagggtagagtttaagtgtatatgttgggggaataaatgtatttttttaattagatgaggaatattttgggatgtagttatatagagttattgagaattcggtaggagatagggtttggtggtgttgtttaggtcggattggaatttaagcgatttttttattttagttttttgagtagttgggattataggtacgggtgaatatatttgtttagttttatggtatttttagtgtgattttttatttagggataatgatttaggttttttattataagtttattttaaaaatatatttattatagttaaaaaatgaattaatttaattgttttgttttttaagaaatatataaaaattttcgtatataaaattaaatgatttttaattaaattgataaaattatttaatggggaaatagtttttttaattaacgatgttgggaaaattggatatttataggtaaaagaatgaagttggatttttattttatattatatattataaaaattaattcgaaacggattaaagatttaaattcgaaatggataaagattaaaaattaaaaaatttttagaagaaaatagagtaaaagttttatggtattggatttagtaatgatttattggatatgatattaaaagtatagttaataaagtaaaaatagataaattggattatattaaagtttaaaatttttgtgataaaggtataataaagggtataatagtgaaaaggtatttacggaatggggaaaaatatttgtaaattatttatttgataaagggttaatattagaatatattaaagtatttttataatgtaattaataataaaataataattagattttaaaatgggtaaaggatttgaatagatatttttttaaagaagatataggaatggttaataagtatatgaaaagatgtttaatattattaattattagggtaatataaattaaaattataacgagatattattttatatttattaggatgtttagtattaaaaaaataagagttggtaagaatgtagagaaattgaaatttttgtgtattaataagtgggaaaattaaatagggtagttagtgtgaaaaatagtattgcgtttttttaaaaaaattaaaaatagaattgttatattatataatttagtaattttatttttgggtatatatttaaaagaagtgaaagtaggatttcggttaggtatagtggtttatatttgtaattttagtattttgggaggttgaattaggcggattattcgaggttaggagttcgagattagtttggttaatatggtgaaatttcgtttttattaaaaatataaaaattagttgggcgtggtggtaggcgtttgtaattttagttattagggaagttgaggtagaagaatcgtttgaatttaggaggtggaggttgtagtgagtcgatattatttcgttttattttagtttaggtgataagagagaaattttatttgggaggttgggagggtgggggatggaattaggtttttaagtaatatttgtatatttatgtttatagtagtattagttataatagttaaaaggtgagagtagtttaagtgttagtagaagaacggataagtaaagtgtgatgtatatatataatggaatatttagttttaaaaggaaggaaattttgatatttgttataatatggttgaattttgaggatattattttaagtgatataagttatgataaagggataaatattatgtggttttatttatatgatattaagagtagttaaatttttagaaatagaaagtggaatggtagatgttagggattgatagagaggaggatgaggagttattgtttaatgggaattgaattttagttgcggaagataaaaaagttttggatatggatagtgatgatgattttataataatgtatatgtatttaatgttatagaattatatatttaaaaatggttaaaatggtaaattttgttatgttttattttgattaaaaataaataaaaaaaaggtcgggtacggtggtttacgtttgtaattttagtattttgggaggtcgaggtaggcggattatttgaggtcgggagtttaagattagtttgattaatatggagaaattttttgtttattaaaaatataaaattagtcgggtatggtggcgtatgtttgtgattttagttgtttggtaggttgaggtaatgaggtaggagaattggtggaggtggaggtggaggtgagttaagatcgtgttattgtattttagtatgggtaataagagcgaaattttatttaaaaaaaaaaaaattaaaaaataaaataagggttaggtacggtggtttatttttgtaattttcgtattttgggaggttaaggtgggtggattatttaaggttaggagtttaagattagtttggttaatatggggaaattttatttttaataaaaattatagaaattagttgggtatggtggtacgtatttgtaattttagttatttaggaggttgaggtaggagaatttgtttaaatttaggaggtggaggttgtagtgagtcgagattgcgttattgtattttagtttgggtaagagagatttcgttttaaaataaaataaaataaaaaagtatatgttatatgattttatgtataaaaagtttaaaatttggtaaaattaatttatggtaagatagtggtttttattttttatagggagaggataattgggaagatgtaaggaggtatttatggtgttggtaatgttttgtattttgatttggatagtggttagataggtatatttaaaaatttattaagttgtataattaaatttcgtattttgttaaaggaaaaaaaatattattttttagagttatattgaaatttagaggtttttttagagaaaaaaatatataattaaaaaatttataaagtttttttatttgttgatttaaaggtttttaattatatttagatggggatgtatttgaggtaataataaagggttcgggttgaatgataaaaagttataaaaatgtgaattattttttaatagaatatttatttaatgggtagtagagtttataaagatagtacgtttatttttgagaattttatagttttcgataaattatttttgatttcgaagttttagtagttgtttatttgttttaaaaaaggtagaagatttaagagagataatttatgagaattttttattgttatattttatttttttgaagattttaatagttattattgataaaaaaaaaaaaataggtagttttaggaatatattttttcgaagtatttttatgtttgtgataaattattatattgtttaagaaaatttaaattcgttttaggttagtattattttattattaattaagaaaaagtaataaataaatttaatttaaaggttagaaaattattagattagttttttagagtttgttattatggtaatagtttttattatgtttaaatatgtaaatattatggaagtattattgatttttttaggtatttagatttttaaaaatattaaagataatgattgaagtaagggtaattagtgtaaatttttgttgtagaaagtatagatttatttatttatttgggagagtaattagtaatatttattaatatttaaaatgattttattttttgataaaggaatttattttatagaataaagatattttgaaagtatgtttgtaaagttgaaaaaaaaattaaaatagtttaaatattaaggggattaaattatataattgatatgtaatgaaattttatgtaattatttaaaagaataaggtaaattttttgtatattgatagtaaatatatttaagatttattaagtgaaaaaaagttaattttttttttttttttttttttgagatagggttttattttatcgtttaggttggagtgtagtggtgtaattatggttttttgtagtttcgattttttgggtttaaataatttttttattttagttttttgagtagttgagataatagttatgtattattatgtttagttaatttttttgtttgtttttggtaaagataaggtttttttatgttgtttagtaattttttcgtttttgtttgtttaagggtagggattatagatatgagtttttatatttagtttatttttaattttatttggttagggtatggtggtttataattgtaattttagtatgttgtgaaattaaggtgggaggatcgtttgagtttaagagtttgagattagtttgggaaagatagggagattttgtttttataaaaaaaatgttttaattagttaggtgtggtagtatatatttatggttttagttattcgggaggttgagatgggaagattgtttgagtttaggaggtagaggttgtaggttgtagtgagttatagttatgttatcgtattttggtttgggagataaattaagatcgttttaaaaaaaaagtaaaatattttatttatatataatgatatatataattattttgttattttagttagaatttagaaaaaaatttgaagaaatagaaaattattaatagtggttattggagtaaagaatacggtgttgagttttgaggaaatatgagggaaaaaaagaaaaattatttatgaaggtggataaggtaataaattgatgttattattattgtgattatggtaattagattattttaatgaaaatatatgaattagagttttataaagttggaaaggattttagaggttataaatattaatattttatttgatgtatataatgtttaagaggtggtagggggtggttatgtttggggaggcgtattaattacgtgggaagttttttaaagtatatttattatttatagaatttggtaagttatttttagatggagaattattaattttttagagtttgtgttattgataaggatattatattttttagatgtattggaaataaaaaaggtaaaaaaaaaagtttgtttaaaatgttttattattaatgattttttagtttttttttgggtatttttaaagatggaaatttattatttttttaagtagtttgttttattttagtaattttgatttattttatttttttaaatgtttatttattttataaaatatttattaaatatttattatatgataagtattattttaggtgttaggaatatggtatagaataaaatagtttggtttttaaggaatttatatttttatggagagaaatatataattaataagttaataaataaattaggaattattaggtagagatatgtattatgaagaaaataaaataggataataaagagtgattgggaagttttttttaaatttaattataatagaaggtttttttaagagtttgttatttaagattaatatttgaaagataaggaattaattatgtaaaaatttgggggtagagtattttagatagtaagaataattttgatatgttataaatataaggatagacgttaggtatggtggtttatattcgtaattttagtattttgggaggtcgaggcgggtggataatttgaggtcgggagttcgagattagtttgattaatatggagaaatttcgtttttattaaaaatataaaataattagttaggtttggtggtgtatgtttgtaattttagttatttaggaggttgaggtagaagaatcgtttgaattcgggaggcggaagttgtagtaagtcgagatcgtgttattgtattttagtttgggtaataagagtaaaattttattttaaaaaaaaaaaaaaaaaaaaaaaaaaattaaggatagattaataagattatagtgattaaggggaaggatataagggttaaattttgaggggtatggtaagttttagaaaatagtatggatttagttataagagcggtggaatagtataatggttcgtaaggttaaaaagaggtagaaggtcgggcgtagtggtttacgtttgtaattttagtattttgggaggtcgaggtgggtggattataaggttaggaatttaagattagtttggttaagaaggtgaaattttatttttattaaaaataaaatataaaaaattagtcgggtgtagtggtaggtttttggaattttagttattagggaggttgaggtagaagaatcgtttgaattttaagggcggaggttgtagtgagttgagatcgcgttattgtattttagtttggcgatatagtgagattgcgttttaaaaaaataaaaataaaaataaaaataggttaggcgtagtggtttatatttgtaattttagtattttgggaagttaaggcgggcggattataaggttaggagatcgagattattttggttaatatggtgagatttatttttattaaaaaatataaaaaaaaaaaaaaaattagtcggttattgtggcgggtgtttgtagttttagttattcgggaggttgaggtaggagaatggcgtgaattcgggaggcggagtttgtagtgagtcgaaatcgcgttattgtattttagtttgggtaatagagcgagatttcgttttaaaaatataaaaaataaaaagaagtagaagaattatttaggatttaaagagtttaggggaatggtagtaaaaatggatagaaataaagatatataggttatattttggagaagatagagtttgttgatgaaatagatgtaggagataagagaaattaagggatttcggaaatttaaatttttttatttaaaaatataatcggtcgggtatggcggtttacgtttgtaattttagtattttgggaggtcgaggtgggtgaattatttgaggttaggagttcgtgattagtttggttaatatggcgaaatttcgtttttattaaaaatataaaaattagtcgggtatgggggagcgtgtttgtaattttagttatttaggaggttgaggtaggagaattgtttaaattcgggagatggaggttgtagtgagtcgagattgtgttattgtattttagtttgggtgatagagtgagattatgttttaaaaaaaaaaaaaaaaaaaattataattaatattgatattacgtattaattggtgaagaggtagatggttggatgagtaggtttgattttggatatgttaagtttaaggtatatattagatattaagtgaagatattaagttggtaattggatttattaatttggaattcgggggatagtttaaaattaaaaatataaaggagtagttgtaggtatataggtgttatttaagtttatttatttaaaaaaaaatataaagtgaaggtatttataattatgtttttagttagagaagcgtttagtataaaatagtagaaaggaaaaagtagtgaggtgagatagaataagtaggagagtgttgtatttaagaaaaaattttttttttatatagaagttaatatttatattaaatgttaaacgttgtaatatggtaagagtagttttagtgaagtaatttagtgaagtagcgaggatagattaatattaagagtgggttaaggaatgaatagttaagggaggaagtaggaatattaattatttttttaagaaattttgtaatgatggaaaggaaatgggatggtagttagaagattatttgtggttaaacggattttttttaaatagataatattagaatatgtttgtatgatgggaatgatttaggagagaaatagaaattaatgatacggaatagaggaataattgtagaagcggagtttttgagtgagtaagggaagattggattttttgtataagtagagtttttataggaaagagatatattatttattatgagaagttagagagtatgggtataaaagtaggtgatttgttatgatttagtggtgaaaagatgaaggaatttttatttattttttttttttagtgaaaaaataaaagtaagattattaattaagaataaaggaaaagaggaaaaatagagtgatttatgaagtttattttaggaaggcgaatgtataagagaaatattattgtaggattattaggtagggttggatgtatattgtgtttttatttttattaataattttttattagtattatatttatatttatttgtttgtattttttattaattataaattttgtgagagtagaagttacgtttgtgtgttttatagttgaatttttagtattttggtagagaatttagtatattattgtttattatttttgatatgattataggtttgtttattatttaatatatatagtgtttagtattgaggatggagagatgagaagatagtttttgtttttaagggtttattttttagagagaaggtagatatttaaatatagtataatgttatattttttttatatatatatatataaggtgaaaaaggaatatagaggaaagattttaatttgttggagagttagggaagggttttaaagggtaataagttaggtatagtgttgtgtgtttatagttttagttatttaggaggttgaggtaggattgtttgagttaaggagtttgaggttagtttgggtaatatagtaagattttgttttttttaaaaatagtaataaaaaaaaaaggaaattgtatttgagttgagaagtttaaaaagtgaaggaattttgaaggtagttaagtaaaggtaaatagtttgatatatgagagtgtttagagaatgataagtagtttaatattgttggagtagagtatagaggaggtagaggtaagagatgaagttgtagatagcgaggaagttagattatgaaagagtttgtatgttaaaaaaaaagttttaattttattttgggaaatataaattgtatatgggagtgatataattagatttgtaagttaaattaagtttgtaaatatagtagaagatggattggaaattagaggtcggaaggttagtaaggaggattatagtagtttttataagagatattgagaggttaaaatagaggatgaaaaagtagtaatgatatgaaagatatttagaaataagattattaggtatatgggtggtaaatttttaatttttcggataatagttatgagagataatattaggatttatagatttgatggataattttaaaagaaatgttggattttagtttataatagtttaatagttttcgtgagatagaaaattttggattaggtttttttgttttatagatttaaattggttttgaatttgtaaattaggaaaaataaaattattttttaagataaaattattttatatagattagagaatagaatagatgaaagttgggaaatgaattaaaatttgttttaagattaaagatttattttgaggatagttttaatgttttttatttattttttttaaatagtattttaaatgagtatagtttttagttgggtaaaaaaggaaattaaagggttgttaatattggaatataattttaaaaaagggatagatgtttttttttagagatatttaattataagataaatagttagttattggatgtttgaaatttgttttaaatagaaaaatattttatttttgaggtttttttaaagttaatatattatattttgatgatttaaaatatatataaaaaaagattttttaatgataattttttatttttggtttttttttgaaattatggttaagttttttagttatgagggaatagaagaaaatagattatttttatattattaggtttaataataataggttttttaaaggtttggtagcgttttgaattggtttaaaatgtattggttaatttttaaagagtatatgttaaattaatatatgtagagggaatagaagagaatagattgttaaaaaaaaatagagaagattaaagaatatttttttttaatttattttatatgttaatattaattttaaatttttttttttttttaaaaaagtatttttagtgtcgggtgtggtggtttacgtttgtaattttaatattttaggaggtcgaggcgggcgaattacgaggttaggagattaagattattttggttaatacgatgaaattttgtttttattaaaaatataaaaatttagttggacgtggtggtaggcgtttgtagttttagttatttaggaggttgaggtaggagaatggcgtgaacgtaggaggcggagtttgtagtgagtcgagatggcgtattttagtttgggggatagagcgagatttcgttttaaaaaaaaaaaaaaaagtatttttagaagttttattattatttataggataaagtttaaatttttggtcgggtatagtgatttatatttgtaattttagtattttgggaggtagaggtaggcggattatttgaggttaggagtttgagattagtttgattaatatggagaaatttcgtttttattaaaaatataaaattcgtcgggcgtggtggtatatgtttgtaattttagttatttcggaggttgaggtaggagaattgtttaaatttgggagatagaggttgtagtgaatcgagatcgttattgtattttagtttgagaaaaaagagtaaaattttattttaaaaaaagtttaaattttttggtttggtatttaaatatttagtatttagtattatttaattttttaatagtatcgtttatattttttttttttagtttattggatttttttatttttttgtaataggaaattttataggaaagttagaaattttagtattataaaaaggaataaggttatttttgttaataattaaaataaaggataagcgtttaaattttttattaaaattagtttttagttgatgatttaggttaataaatggtagaagaggtaggatttaggaaagttaatgttgttaaaagaagggtaaattatatttttttgtggtaattaagaattattatgaattttttttttttttgaagttgtttttatttttatagttttattatttgttatttaatagatttggaaattttaattttttttattggttttattattaatatgtttttttattaggtttttttttaatgataagttatttagtttttattggagaggagaaaggtagtttagtttgttaatttaattttagttataacgggtttaaaaataggttttggtataagtgaaagttatttgtttaaaaaaattttttggttttattatattgataatttataattttagtttatgtttattttttagtaaattatattttttaaagtatttatgaaaaattattttagattttagaggtttatgaaggtagggtgatttttatatggagaaggtattttttttaaaattagtttttagattttgttttgtttttatttttttagatttggaaataaaaatattaaataaaattaaattaaaagtttttattaaggtttttttttcgggttggttaataaaaatatatagtatcgtggtagagggcggtgggtgggtggtggagaatatttagagtaaaggggtagtgtatttggtcggatgatggttaatatattttgaaggtaaggacgttattatagataattaggttttggttatttaggataaaagttaaagatggtaattaaatatttaattaaaaggttaatttgtaattttagtatataagttattagatttttagatttgttttaaattttaagaaatatttttggtgtgttagaataatgtaaatgtataataagtattttataggtttgtaattttaagtatagtattattgttattagattttttttttttttttttgaggttgagttttatttttatttaagttgaagtgtaatggtacgatttcggtttattataatttttatttttcgggtttaagcgattttgttttagtttttcgagtagttgggattataggtgtgtgttattatgtttggttaatttatgtatttttagtagagatggggttttattatgttggttaggttggttttgaatttttgattttaagtgatttgtttatttcggttttttaaagtattgggattataggtatgagttattgtgttaggtttttagataattttaatgttgtattttgtttgtattttaattagattataaattttttacggataaagaatatgtgttaaagtttttattataatgttttatattggattgaaaatataattgatgatttgattgatgattatattgaaaagaaattatgaatgttggtatgtttttaaagttaaagtagtaggtgatattagtgatagaggttacgtttgtttttagtatttattgaattttcgttgggtaagaaaagttagattttaataaaaattgatggagattgttttcgttaaatatagtagtttataaggttattaaattttggaattaaaaggaaaaataaggttaaaatagagttatgtgaataaaaattgggtttaggatagtgaaataatagtttttttaataagaaaaaaagtagtagtagttaaaaggtaaaattaagtaaaggatgatttaataagaaaagtattagtatttatattttttgtatttttattgaaacgttttatcggagattggtaatgattaggttaagatgatagagatgatttaaggttgggttttttatttgaaaagtttattaattttagagttgtgttaaatttaagttaaagttggaatagggtttttttcggattaatattaagtgaagtggattattaagtggagtagcggtacgaaggtggtttttttagatttttaagtttaatttttacggagtcgtttggtattaggtatataatttaagttttttgagttttaatttttttatttataataaaagggtaatgtaggttttttttataattttaaggggcggtggtttgatatagagtattatgaaaataaaagtagtatattaaagtaatatattattattatgattatttatagaattattattcgttaggatgaaattttttatataagagatgaagttcgagagaaaagagttgaaggggaaggtttttacgaggagatagtaatcgaattgtagcgtttcggttagtagtatatatagtaggtacgcgtttagtaattttagacgttgcggagtggagtttaagtatttttttaagaatcgcgaaatgatagatattatcgacgtcgatataattgtacgtaaggtattttagttcgcgttttaaatttttggaggattcgtcgattatatcggatgtgttgtttgcgtatgcgtattttcgtgatttaatttcgtttttttcggtgtgttaatttgcgtaggcgttgaggtcggttagggcgcgtaataattaatgcgtagacgcggattgtattaatagatttaattataatttagaaaagttaatgcgtttgcgtaatggttttattaatgagttggggacgtgtattttttttgttttgttttcgttcgttagttcggtgacgtttatagttgttttggtaataagatatattgggaggaagaggggaataagttttattggggatcgcgtagttaattagaggtattcggttttttttggtttttttgagttttggaagatttaacggtttgtatttattttgaggtaatgtttggcgtttttggggtttgatattagtttgattttaattttgttaagggcgttgtttgtagatgtttgttatagattattggaataagttaagtttattcgtagtgagattcggcgcggttaattattgtataggttttagtttagatttaattatttgggggagtgagtgggtgtggtgaggggcgggaggtagggaggaagtttgattttagtagggttttgaattggaattcgggatttggttttgtaatgttaatatttattgggcgtttttttggggtttgacgttgtattaatttgtagggatttttacgtgaattagatatatttgtagttttaaaagagttggtgaagggagggatagttgtcgaatgtcgtgtaaaaagtatatggttaagtttagtagtttttttttcgtaagttggtattttgaatttggtgtaatatttcgggatgttagcgtcgaaaggttcgaaagagtatgtttggtttaattttattttttttaatttattttgtagaagaaattgaaatggttttaggttttgtattttaataagtgggattattttgagggttttaattgtttttttttttttttttttgagacggagttttgttttgtcggttaggttggagtgtagtgtcgcgatttcggtttattgtaattttcgtttttttagtagttgggattataggtacgcgttattacgttcggttaatttttgtatttttagtagagacggagttttattattgttagttaggttggtttcgaatttttgattttgtgattcgttagtttcggttttttaaagtgttgggattataggtatgagttattgtattcggtttgttttaattttttttaagaaattaagttttggttttcgttgtttttttaattttacgtgaattcgattttttagatttagtttattttattttttagttgtaagtttttttatatatgattaggtattttatttttagttttttaatattttgaattgtacgtgagtaaaatttttaaaatagtaggtgaataatagcgtttttgtttttttattttttttttttttttttttgagatgaagttttgtttttgttatttaggttggagtgtagtgaatggtgcgatttcggtttattgtaatttttattttttgggtttaagttatttttttgttttagtttttcgagtagttgggattagaggtatttgttattacgttcggttaatttttgtatttttagtagaaacggggtttcgttatgttggttaagttgattttgaatttttgattttaggtgatttgtttgttttagttttttaaagtgttgggattataggagtgagttattgcgtcggtttttttttattttttatttgtttttagattggaaattttatacgtattaattaacggatgtattattagtggtgattaaagttttatttaagttttagaaagaagagaaataatttaagaaatttttagagtttatttgaatagatagatttatatttatattcgtggagatttgtgtagttatatgaatataagtttagtttaaatttatgttgttgagaaagaaaaaaaaagagtggataataagttggtttttattttaatataatatggtaggaagtattaatttttttgataagttgaatttttttttttgttttattaataagtaggagggtagtttttttacgaatatttaattttaaattttataggttaggttgatgttttttaattatttaggtgtggattttttagggagtttttgttttattagttaggttttttttagtgtttttttttttatgttttgtttgtttttgatttatgttaattattattattaagatttttttaggaatttttataggagagaagaagagatgaaaaatattaaatggatttattgaatgtatttgtttttgagatttgttagttatattaatatattatattagggtttttttgaattatttaaaatagtaagaaaaggtttatttttttatttagtttatgattttataattattgaaatatttttaattgatttgttaataggaaattgttaatattagtgttgattttaattagtttaaattagaatattaatatagtttaaaatttttgtttagagtagtggataagagtgtaagttttagaattagatagttttaggtttgaattttgattttgttgtttattagttgtttaatttggaataagttatttagtttgatagttttattttttttttttataaaatagaaataataatatttggtttattgaaattatgtgaggattaaatgagataatgttaagtattaagttgttagtatagtgtttggtagatagtaaatgtttagtaaatgtttgtttttattaattattattaattttagtaattaattatgtttgttttttttagttttttgaatgattaaaagttagttaaattatagcgtttttaataatttgggtatgtaaaagatagtattggagggattgtaatttaaatggtttttaaagggtagatttaatttataagttgaaattgaagttagagtatattttaggggttttattatataaaataatggaagagtggaggagtaagagggtttttttaagggtaaagtttatgattttatattatatattttttataaaaagaaattatattatttattaaaagaaatataaattttttaaagtttgagtagataataatttttttaaaggaaattttcgtatggaaaagaatgttttttttatttttttttttttgtattgttacgtttgttttaagatttttttttttgtttttgttaattgttattgtatatataatttttattttttaaattttggttttagtgtgattaaaattttttttttttgttttttaatagaatagataaaataggttattatttttagaaataaaaatttaaggagaattaagttgtaaatagtataaagttaaatttttaaagtattaagtttttgattaagttttagtaaagtagtaaatatttttagtgaatttatatttttttatttttttagtttttgatgaagtggaataattttttagtttttttgtttggttttttttttttttagttgtttgggagttttaaaaaagttttagttttgtttttttgttggtattcgaaagtgagtttattatattgttttttttaagagtagattatttattataatatggggttgaaattattagtgtttgagtaatagtgtgtaatagaattttttgtgataatgtttttgtattgtttagtatagtaattgttagatatatgtggttattgagtatttaaattagttagtgttgtaatttaaatgtaggtttattttttcgttgtttgtagagtttatttaataagagtgagatttggtataaagaaaatgatattttattttaaagttattttaggggaggaagtattggttttttgttttaagggtattattttatttttggagtagaaagagggtgtttttgaaatggggtatggaatgttggtatgaatggtacgaggggaggaagcgagtggttggggggtttgtatattatttttagtgttttatttattggatagtgattgttggtgttttttgtgggtaggattgggttgtaaaagtggttaaaattttttaggtaagagaaagttttgtagtaggtatattttgggttgtagataggttgttgttttttaaggtaatttttcggtgggtgagagtttttttttggagtttttaagtatatagttagatgaatttgttttatagggagtgtttgataaagaggaggtaaaaggttataattgtatttttaaagagttaaggaggaagtgaggagaagggggaaaagaagagagattttttaaaaattattaaattattttttagaaaaatggggatatttggttatagtgtgattaaggaaattttatttggtttttatttaaatttaagtagttatttgtggttagtggttgttattggatagaataatttatgagttattttatttatttttatgtttagttaaagagatatattttgtttatagtttatttaaatggtagtgatatttatttgaaataagaataatttatagttgttaggtttgagttattagtttattagttttatttatttttggaatatttagtgatgatttatagttatagaaagagggtttgtaattttttaaggagtttattttgttcgttgtttagatagagttggtttattaagattgggtaattagaatggagaaagagtaatttatatatagttagttgtgtaggagaacggaattttattattatttaaattagtttttttaagtattcggggattagagtttttaaggataatttggttggggaagttagtgagttacgagttttgatggtcggggatgaaattataaggagttaaagttgtttttttgttttgagtttttgggtggggggcgttgtaagattagatgagttagtttattaatttgagtggtattagttgatttattaagtgtaggggttattaaatat

SEQ ID NO: 33 - DNA, 5001 bp, Artificial Sequence
  chemically treated genomic DNA (Homo sapiens)
aagtttaaaagataattgttttagtatttaatttaaaaaatataaattagttagatatagtggtgtgtatttgtagtcggagttatttaggagattgagataagaggattatttgagtttaagggtttgagattagtttgggtaatagcgagatttagtttaaaaaaagaaaaaaaaacgttaataataataaaaaaatttattcgtttattaaattatttgtaaggcgtttgaatgaaaggtgttttttttattgtggttttgtttagggtatttatagttgtaggtgagttaatttgtttggttttgttttttttaggtttgtttttttatgatttatttgtgtgagaaaattatttttacgttgtttttttggaggaagtttaatggatttaattagttgatgtcgttgtagtagtttgtgtacgacgtgtaggattagttgaattttttggttagcgaggaggattttaggcgtattgtttagtagttttatagtataggcgaggtgagtttttgggagtttaggtagggggtcgtgagaggtgttagggatttagtttgttttaaattttagtttttggaagtggtgtgagtttggggaagtagtgtggaaatggtttagttaatttataatatttttatacgtgtgataaatatagttttaagtgacgttttgaattgtagttttcggtttattttaggagttgttattttgttttgtcgtgttttgtttttatttttagagtttgttagtttgggagtgtagtgtttattgttttgggtgattgggtttttttttattttttttgggtattaggaatttaatttgttatttttggtagtttttaggatggtttttttgtattagcgtggagttattagttttatatagattttttgggtgggaaaatagttgagaaaaggtagtgaggtgtttttgtggaggtaatgtttggagatataaagatagagaattttggtgtatagatatatagagtaattataattaaagatgtatattaaaaaattttagtaagtaatgtttagtagaaatgattgagaatgggaggttttgttttggttttgtgatattgagtattagggcgcggtttggaaattttgttttaatggtattatatgtttgttttaggaacgggggtagtgttttcgtgtttttttattatgtgaaattgggagtttatatgaattagtgtgggttaagaagagcggttttgaatattgtaattaaaagtagttttgagattattaaaagttagatgtttatttttttaattttaggtgttaggtttggttttatagttagtttgtatgagttatataaattttttgaaattaaatttgaatttataagttagtgattttgaaaattggagtcgtcgggtagtaattttattagtttttaaatttttagttaaatggttagagaatttgttaatttatttaggaatattttaaagtgattgaatttaaggaagaatataggtgaaggattatattttagatgataagatattgttggatgtaaaaaatgtgttaattttaattttaaatttttttggtataggagttttttgttttttagtagtagattagtaattttttagattatattatatagttttttttatttgttattatatttttgtttgtttttgagagtttagtaagtaaatgaagatgtaaagaaggagggtaattaggtagtaggaattatattgtgtggttcgattttgattggtttcgggttttttttagatttgtttttcgtatttaatttgtagatttttagaattttttagtggtttttttgattttgttttttggtttagggttttatattacgtttagttgattgttttagttttttgtttttttttattatgggatagtttcgttttttttgagtttgaggcgatgagtagtgtttaggattaaattgtaaatggtattttagtaaatgttgtattaggaattagattaatattggttttgttttttagaatttttaatttaggtttaattttgaatagatttttagatagggggtattttttaggtttaagttagattgtggtaggaaattattgtgtggtttcggtggggttagagtttttaagtgagggagtttagggcgatggttattttttaagaaaggaagtagaatttttttataaagggaaagttttttttgttttttgttattttttttttttttttttttatttttttaagaaataaatataattaaaaagttaaagtttttttgggttattatttttggttttatttttttttttttttttcggaggttaattattattatggtagtatatttttttaggttttttttatgtgtgtgtgttaaatatttatataatggtataataatagaatgttttgatttttttttgaaaatgtttttaagtttttagagaagttgtaaggatagtattatgaatttttatataggttatatttatttatttttttaattaattaattaatttttttttttttttttttgagatagagttttattttgttgttaaggttggagtgtagtggtataatttcggtttattgtagttttcgttttttgggtttaagtgattttgttttagtttatagatataagttattatatttaattaaattttgtatttttagaagagatagggttttattatgttggttaggttggttttaaatttttgattttaagtgatttattcgtttcggttttttaaagtgttgggattataggtatgagttacggtgtttagtttattatatttaagttgattagttgttgatattttgttatatttgttcgattttttttttttttatttatttatttatttattttgtagatatgatgatattttttttttaaataatttagtttatattttttaaggagaaggatatttttttatataatttaatataattgatgattttagaaatataatattaatatagtattatgattgaatatattatttttatataagggtttgttattggttttaataattttttttaaagttatttttatttatgtatttattttgggatttagaatttagtttaaaattatttattgtatttggttgttattttttatttttttttttttttttatttcgttggtttttttgaagattttaggggagttgttttttagaatttttattttgatatttttaagttgtttttttttattcggtgtttggtttttgagacgtatttacgtggaatggttttgggttattttttagagtatttgtttagtttttgttgtcggtattaggttttttagtgttttaagtggttggtgtatttggttagggttttgtttttaagcgtgattttttgttgttttttcgtagattaatattatgtaaagtgaaatagtttaggacgtgttgtttttggattttcgttggttttgtataaacgttttggggaagttgttgttcgtggagattttacgggcgttgtattattatcggggtcgttatatcgtggaggatatttagcgtttggtgttcgatagcgacgtggaggagttgttgtagattttcgatgttatggatatttgcgttcgggatttgagtagcgggattatggtggacgttttagttttgattaagatagataatttgtatcgtttttgggttgatgaggaggacgaggtgatggtgtatggtggcgtgcgtatcgtgttcgtggaatattttattttttttttatgtggtattttttataaggtttaggtgaatttgtgtcggtggatttattagtaaagtatagagggcgacgcggatattcgtttgtgggtgaatggttgtaagttggttaatcgtggggtcgagttgttggtgttgttggttaattacggttagggtattgaggtttaggttcgcggtttggagacggagaagattaagtgttgtttgttgttggattcggtgtgtagtattattgagaacgttatggttattacgttgttagggtttttgatcgtgaagtattatttgagtttttagtagttgcgggagtattatgagttcgttatgatttattagttacgggatttttttcgggtatagattttgaaggaaattttattgattaatattatgggggggtataaggaaagttttagtagtattatgtgtttcgggtgttacgacgtttatttataggttagtttcggtatggatatttatgtattagatttgaatttttttattcggaggaaattgagtcgtttgttggattcgttcgattttttggggaaggattggtgttttttcgttatgaatttaggtttttttgatttcgtggtaaagtataatattagtaacggggtttttaaggattttttttttagttttttttacgttttgttgcgggaatggattatttattttgagagtatagtgggtatttttatgtttaaattgagggagttgggtcgtcgggatgtcgtagattttttgttgaaggtattttttgtgtttaaaattaatttggatggtaatggttaggaggtttatgtttcgagttgtaatagcggtattttttataattttattagttttgttgtatttcggtgagggtagtttttggtttgggtagggtttgtttggattgtagaagtaagggggtgatgtagtttatttttttttttggagatgttgagggtgtttttttttgtatttatagttagggggatgttattttttttttcggtttgatttgtttttttgtcgttattttttttttcgttttatttcgttgtttgtggatggttattgtagtttaagagtagaatagattttttattttggtcgtttgaaaagttagtgtatttttttttagtgttttggattttattttttattttttagtattttgttttttattgataattttgttggaatttttaattttttaatgatattt

SEQ ID NO: 34 - DNA, 5001 bp, Artificial Sequence
  chemically treated genomic DNA (Homo sapiens)
aaatgttattgaaaagttaggaattttagtaaaattattagtaagaagtaaggtattggaggatgagagatggagtttaaaatattgagaggaggtatattagttttttaagcggttaaagtaaaagatttgttttgtttttaaattgtaatgattatttatagataacggaatgagacggggagggaggtagcggtagagaaataggttaagtcggagggaggagtggtatttttttggttgtgggtgtaggaagaaatatttttagtatttttaaagggaaggatgggttatattatttttttgtttttgtagtttaaatagattttgtttaagttagaggttgtttttatcgggatataatagagttaatggaattgtaagaggtgtcgttgttgtagttcgaggtataggttttttggttattgttatttaggttgattttgaatatagaggatgtttttagtaaaaagtttgcggtatttcggcgatttagtttttttagtttggatatgagggtgtttattgtgtttttagggtaggtggtttattttcgtagtagggcgtggagggggttggggaggaaatttttgggagtttcgttattggtgttgtattttgttacgaggttagggaggtttaagtttatggcgagaaggtattagtttttttttagggggtcgggcgggtttagtaggcgatttagtttttttcgagtgaggaggtttaggtttgatgtatggatgtttatgtcgaggttggtttgtgagtagacgtcgtgatattcgaagtatatgatgttgttgaagttttttttgtatttttttatggtgttggttagtgaggttttttttagagtttgtgttcggaagaagtttcgtggttggtagattatgacgggtttatggtgttttcgtagttgttgggggtttaggtaatgttttacggttaggagttttggtagcgtggtggttatgacgtttttaatggtgttgtatatcgagtttagtagtaggtagtatttgatttttttcgtttttaggtcgcggatttggattttaatgttttggtcgtggttgattagtagtattagtagttcggttttacggttggttagtttgtagttatttatttataggcggatgttcgcgtcgttttttgtgttttgttggtggatttatcggtataggtttatttggattttgtgaaagatgttatatgggaagggggtgaggtgttttacgggtacgatgcgtacgttattatatattattatttcgttttttttattagtttaggagcggtgtaggttgtttgttttgattagggttgggacgtttattatggtttcgttgtttaggtttcgggcgtagatgtttatggtatcgaggatttgtagtagtttttttacgtcgttgtcgggtattaggcgttggatgttttttacggtgtagcggtttcggtagtggtgtagcgttcgtggggtttttacggatagtaatttttttaggacgtttgtgtagagttagcgggggtttaggagtagtacgttttgaattgttttattttgtatgatgttgatttgcggggggataatagaaagttacgtttagggatagagttttggttaggtgtattagttatttagagtattaaagggtttgatgtcggtaatagaggttgagtagatgttttaaggagtgatttaaggttattttacgtggatgcgttttaaaaattaaatatcgagtggagaaaagtagtttgaaaatgttagaatagagattttgaaaaataatttttttgaagtttttaaaaaggttagcgaaatgaaagaagaaaaaaaaatgggagatggtaattaaatgtaatgagtgattttagattggattttgaattttaaaataagtatataaataaaaatagttttaaaagaaattattgggattagtggtaaatttttgtatgaggatgatatatttaattatagtattatattaatgttatgtttttggaattattaattatattgggttatgtgggaaaatatttttttttttaggagatataggttaaattatttagggaagaaatgttattatgtttgtaaaataaataagtaaataaatagaaaggaaaggaatcgagtaaatgtagtaaaatgttaataattgattagtttaaatgtagtaggttgggtatcgtgatttatgtttgtaattttagtattttgggaggtcgaggcgggtggattatttgaggttaggagtttgagattagtttggttaatatggtaaaattttgttttttttaaaaatataaaatttagttgggtgtgatggtttgtgtttgtaggttgaggtagaattatttgaatttaggaggcggaggttgtagtgagtcgagattgtgttattgtattttagttttggtaatagagtgagattttattttaaaaaaaaaaaaaaaaaaattaattaattaattaaaaaaataaataaatgtagtttatatgagagtttatggtattatttttgtaatttttttaaaggtttgagaatatttttaaaaaagagttagaatattttattattatattattatgtgaatgtttaatatatatatatagaaaaggtttgaaaggatatgttgttatgataatagttggttttcgagaaggggagagaggagtgagattagagatgatggtttaaggggattttagttttttggttgtgtttattttttaaaaaaataaaaagaaaggaaaaaaaagtgataaaaaatagaaggaattttttttttatggaagagttttgtttttttttttggagagtggttatcgttttggatttttttatttggaggttttgattttatcgggattatatagtaattttttgttatagtttggtttaaatttaaaagatgttttttgtttaagagtttatttagaattgaatttaggttgaaaattttggagggtagagttaatattgatttagtttttgatatagtatttgttggaatattatttgtagtttggttttaaatattgtttatcgttttaggtttaggaaagacgaaattgttttatagtggaggagaatagggagttaagatagttagttaaacgtagtgtgggattttgggttagaaaatagagttagaagggttattggggagttttgaagatttgtaaattagatacggaaggtaggtttggaggaggttcggggttaattaaagtcgggttatataatgtagtttttgttgtttaattattttttttttttatatttttatttatttattaaatttttaagggtaagtagggatgtaatgataaataaaggagattatatgatatgatttagaaagttgttggtttattattagaaagtaagggatttttgtgttaaaggagtttagaattagaattgatatattttttatatttagtagtattttgttatttaagatgtggttttttatttgtgtttttttttggatttaattattttaaagtatttttggatgagttggtagattttttggttatttaattgggagtttaaaggttgatgaaattattgttcggcgattttagtttttaaggttattggtttgtggatttaggtttagttttaagaaatttgtatgatttatataaattggttatagggttagatttggtatttgagattggggaggtaagtatttggtttttaataattttagagttgtttttagttgtaatatttagaatcgttttttttggtttatattagtttatgtaggtttttaattttatatggtggagaaatacgaaggtattgttttcgtttttgggataggtatatgatgttattagaatagggtttttaaatcgcgttttggtgtttaatgttatagaattagagtaaagttttttatttttaattatttttgttgggtattgtttgttagagttttttaatgtgtatttttaattatgattattttgtgtatttgtgtattagagttttttgtttttgtatttttagatattgtttttataaggatattttattgtttttttttaattgtttttttatttaggagatttgtgtggagttgatgattttacgttgatataaagaagttattttgaaggttgttaggagtagtagattaagtttttggtgtttagggggagtgaagagagatttagttatttagggtagtgggtattgtatttttaaattaatagattttggaaataaaagtaaaatacgataagataaaatgatagtttttaaggtgagtcgagaattgtagtttagagcgttatttgaggttgtgtttgttatacgtgtggaaatgttgtaggttagttggattatttttatattgtttttttaggtttatattatttttaagagttggaatttgggataggttgagtttttggtattttttacggttttttgtttgggtttttaggggtttatttcgtttgtgttgtggagttgttgagtaatgcgtttgaggtttttttcgttggttagggggtttagttggttttgtacgtcgtatataaattgttgtagcgatattagttggttgggtttattgagttttttttaggaaggtagcgtggagatgatttttttatataggtgagttatgggaggatagatttagagggggtagggttagataggttaatttatttgtagttgtgggtgttttgagtagagttatagtggaaaggatattttttatttaggcgttttgtaggtgatttgatgaacgagtgggtttttttgttgttgttgacgtttttttttttttttttagattgggtttcgttattgtttaggttggttttaaatttttgggtttaagtaatttttttgttttagttttttgagtagtttcgattataagtatatattattgtgtttggttagtttgtgttttttgggttgagtattggggtagttgttttttagattt

SEQ ID NO: 35 - DNA, 6274 bp, Artificial Sequence
  chemically treated genomic DNA (Homo sapiens)
ggattatttgagtttgggaagttgaggttgtagtgagttaaggttacgttattgtattttggattgggtaatagagttagattttgttttaaaaaaaagaaaaattttatggttttgtttatattatttatttgattttatatgttgtttattttttttattaaaatttttagtttattaattatagtttttttataattaatatttcgatgtgataatgttttagtttaattattgtggttataatagaatgttataaattgggtgatttataaataaaagaagttgatttaggttgatttagaggttggggagtttaagagtttggtgttagtatttgatgagtgtttttttgttttattataatatgggagagggtattacgtgtgaagagagtttatttttataatatagttatttttataagaattaatttatcgttatgagagttatgtgaatttatttatgaggatagcgggttaagtttttaatatatggatttttcggggatatatttaaattatagtagttagttgtaacgttcgtgttatgttttattttggttttgatgtttgtgtagtttttttaaattgcgtttttgttttttagtgtgttttgtaatgtggaaatgatatattgggtaagaggagttgtagtaaagaggtttttagtgacgtagtgataagttgtggggagagggagtgttgtatagttttgtcgtatgttatagttttttagtgagtttgtgtttttggattgtgaattttatgtttgttttttagtttttttagttttttagatggtatagaattgttggaggggggtggagttgtatattttttttgttttgggtaggttattttttgataaaatattaggttaggtttttggtgaaataattttttttgagggtagattttttattaataatagaatgttttaatttattttaaaatggttttttttttttttttattgttagaagtataatgagattttttttttaatattcgtggtaaggatttagtagagttttaggaggtaatatttttaagtgttttatattattttgtattatgattgggttttgttggagtttttaatttgtagaattgtttatattgagtttttcgtaattttttaattatagggtaaatttttttagtcggtattgggtttttggaggtttttgtttgttggtttttttttttggaggttgtgtttttgtgtttgtttgtttttttaatttggggggtagtggtttgtttaatgattttaattttttgaaagagttaagaagaggtgttaatttttcggtttgtttagttttttatttgttgttagaatggagcgttaatagtgttttttatagtgatatgtaatttttaattttagagatgatgaagtatattaatgataaaggagaaatgttttagtagttttttgttagtatattattttttgaaaaagttgttttttttatattttgtaagagatgggttttaatttagagtttaaggtaaatgattttttttaaggagaaggaataaatagttttagaaattatgaaagtttgtttttaggagtgtttttgaattttagtaggggttatatttattttgtagaaataggtgaggtatgtttttggtataaaattttaatggtatagaaggataaattgaaaaataagtttttttttaaatttttgatttcgagttatttagtttttttttttagaggtaaagttgttattagatttttgtatttttttaatatatatttttagaagagttgttaagtgaatatatgtttaagtgaaaatttattttagaagtgtatttttttaaggaattttagggttggaaggaatttgtgttagtttttaatttataatttttattagtatttattgtttttgtataaaaattttttttaaaaaagttttttttattttgatatagtttattttatttttatttagttttaataatttataaaatatatttttgaaagtttaaaatttgttattatgttttttttttttaattaatttttattttgatttttaagttagagaaaataggtggttaaatgttttttgtttaagatggaatttagaatatttgaagattttagatttttattttgttaaataacgtgttttttttttttttttatagagtatttggttttaggaaatttagagttatattttttatagataagattaaatttttatttaatatatttagaaattttttttaagaggataattatttattagaggaaaaaagttttttatgtatagttggtaaagggatggaattatttgtgttattaaaattgatagacgtttatgagatttattaagggaaatattagagttttagtatatatttgttaatatagtatatatgaaggttttatttataatttttttggttaagtagaaattttggtattatttattttaataaatttttaagatattatgaaatagaattttaggttttgatattattatttgttttaggttttgaagcgttgttggataagaggggtaaaatacggttttgttttggatttaaagttggttttttatattagtaagtatattttggtattttggttatttttttcggttatagtattatattgttataaaaggtagatataagtattaattagtttataggttattagataagtttagtttgattaatgtttaatatagtaattgggttattattgttatttttgtggtggtggtatatatatttagtttttgttcgggttatggtttaggattattttttatagaggttgtgagttagagttttaattgtgtagggttttaattatgttaggttatttattttttttaagaggattttattagtgtttgttcggttatatagttttttatttattaagtaatatagttattagtatattttaggtattagttaaggattataaaattaacgtgaatgttagtttttgtattaaaagtttaaaggagaaatttaaattttatatagatgttttatgaagatgtttagtaaatttatttttttttgttttttggaatttattttagtattgtgttatgtgtgtgtttagtaattttttataaaaagttttgttttttgtgatgttattagattatattgaagaatatataagtcgtattatgaaggttgttgttttatatagttttaacgtagtgagaattgatgtttttatatgttgtttttttgggtatttaaagaaatttttgtatagttttataaattagttgtagtttaaattgatttgtgttgtgatttgtatatataggttatatttttttgatagaaaatatagtttaaaattaaatttgtagtttttgttaagtgaatgtataggattttattgtatttaggttttttattgtaagatttatttttgtttttattttatgttttattgttgtgttttttatttgtttttttttagttttgttttttgtgtttttacggattgtttttagtttaggtgtgtaggaagtatatatatgtttgtagagtttttatggtttttgtatttagggtatgattttaacgtatagtggttgtattgatttgttaaaataaaggaatagattattttttttaatttatagggaagttttaggttgtgcgggtagtgagtagatttgtgtttgtttgcgtttgttttggtgaaaaattttatcgtttaggttgtagggtgcgagatttaggtataaatattttgttggatgaggaggaaagatgtaaggttgtttttttttagagatagtaaagggtaggtttgtagttttatttattttaggattgtgatttttgatagagtcgagagattagggttgttgaattaggtttgaaggttttagtgaatttcgtgaagagaggaggggtttggttgtaatatggatttagaggatatttttattgtaggagaaggaatagtggggatggggtggatttgttaaaggaatatagtttaagtttttgtagtttaaaaaagtttagttttttttggttaaagttttcgcgagtttttttggtattttttttgcgggagttataggggtagtgggatatttagtttttttaaaagtatttttacggttgtttgtgttaagtttttattttaagagttttatttttgcgaagtaatgtgttttatatattggttttaaagtatttatggttggttgtaataaatattaaggaggtttgtttttgtattcggagttgggtgtttttattttagatgatttcgagggtgtttgataagatttgaaggattttcggattttagagtattatttcggacgtttggtatttttgtcgcgcgggtacggcgatttttttagttgttaggttagtttttgattttcgagagggtttcgtagtgttgtaggggaggtggggattcgaataaaggagtagttttttcgtcggtgttattattcgacgttggttttaaggttcggttagtttgtttaaagttggtataagtttgttttgtaaaataaaagaagggaaagggggaaggggattttggtatagatttggttcgatttggatataggttgggtttgtaagttcgcggggatcgggtttagaggggtagtgttgggaacgtttttttcggaaattaattttttagggtattcgttttttttttatgcgtcgttttattttcgtcggagattaggtttcgcgggggttatcgttgtttatcgttttcggcggtcgttggttttgggttttcgttgttggtttttttttttttttttcgtatttttttttttttttgtttttttcgatttttttttcgtcgtttggtttttttttttttcgttttgttttttcgcgtttcggttcgcgcgagttagacgttcgggtagttttcggcgtagcgcggtcgtagtagttttcgtttttcgtacggtgtgagcgttcgacgcggtcgaggcggtcggagtttcgagttagtttcggcggtcgtcgtcgtttagatcggacgataggttatttcgtcggcgttcgttcgagttttcgtttcgtcgttaacgttataattatcgcgtacggttttttgatttcgtttagtattgatcgggagagtcggagcgagtttttcggggagtagcgatgcgatttttcgggacggtcggggtagcgtttttggcgttgttggttgcgttttgttcggcgagtcgggttttggaggaaaagaaaggtaagggcgtgtttcgtcggttttcgcgtcgttttcggatcgcgtttcggatttcgtagttcgtttaatcgcgtatcggcgtatcggttcggcgttcgcgttttcgttcgtttttttttgtttttttgagattagttgcgtcgtcgatcgggatcgcgggaggaacgggacgtttcgtttttcggtcgggagagtttggggcgggcggaggaggagacgcgtgggatatcgggttgtaggttaggcggggaacggtcgtcgggattttcggcgtttcgaatcgtttttaattttttttttttatttttttcgtttagttgcgtaggatcggcgttagtgggcgaaagtcgggtgttggtgggcgtttggggtcggggtttcgtacgtgcgtttcgcgttgtttttttagggcgcgacggggttttggcgcgtattcgaggggcgggcgttgtttattcgtcgagattgtattgtttagggaagttgaggaaggaatttaaaaatatagttttttttcggatttcgcgggataggcggttttttgagaggattttttcgttttcgtttttcgcgtaggttttaaattgaagtcggcgttcgttagtttggtttcggtttttttttaggttttcgcgattttcgttttttagtgtggagtcgtagtttcgatttgggagttgggagaattcgtttattattatttgcggttttcggggaggggtggtgttggcggcggttagttttttcgttggtaaaaggtaggtggggttcgattcgttttttgggcgtagatttcggtcgttcgtttcgttcggtgcgttttcgttttgtttatttaagagtgttttttatttttcggggattttagtttttttttgggcgttcgcgtcgaaagttttaggttttttttcgatggtcgtttcgcggagacgttcgggtttgttttatttgtagtttttcggtcgcgtttgggtttcgcggtggagcgggacgcggttgt

SEQ ID NO: 36 - DNA, 6274 bp, Artificial Sequence
  chemically treated genomic DNA (Homo sapiens)
atagtcgcgtttcgttttatcgcgaagtttaggcgcgatcgaagggttgtaggtggagtagattcggacgttttcgcgaggcggttatcgaaggagagtttggggttttcggcgcgggcgtttaggagggagttggggttttcgggaggtggggggtatttttggataggtaagacgagggcgtatcgggcgaggcgagcggtcggggtttgcgtttaaggggcgggtcggattttatttgttttttgttaacgaggaaattaatcgtcgttagtattattttttttcgggagtcgtaggtggtggtagacgagtttttttagtttttaggtcgaggttgcgattttatattggggaacgaggatcgcggggatttggagaggggtcggggttaggttggcgggcgtcggttttagtttgagatttgcgcggagggcggaggcggggaggtttttttagaaagtcgtttgtttcgcggggttcgaggggaggttgtatttttgggttttttttttagtttttttaaatagtgtagtttcggcgggtgggtagcgttcgtttttcgggtgcgcgttaggatttcgtcgcgttttgggaagatagcgcggggcgtacgtgcgggatttcggttttaggcgtttattagtattcggttttcgtttattgacgtcgattttgcgtagttgggcggggaaagtgagggaagaaagttgggagcggttcggggcgtcggaggtttcggcggtcgtttttcgtttggtttgtagttcggtgttttacgcgttttttttttcgttcgttttagattttttcggtcgaagaacgaaacgtttcgtttttttcgcggtttcggtcggcggcgtagttgattttaaggaaataggaaaggacgggcgggggcgcgggcgtcgagtcggtgcgtcggtgcgcggttgggcgggttgcggggttcggggcgcgattcgggggcggcgcgggagtcggcgagatacgtttttatttttttttttttttagagttcgattcgtcgggtagagcgtagttagtagcgttaggagcgttgtttcggtcgtttcggagggtcgtatcgttgtttttcgaagagttcgtttcggttttttcgattaatattggacggagttagggggtcgtgcgcggtggttgtggcgttggcggcgaggcggggattcgggcggacgtcgacgaggtggtttgtcgttcggtttgggcggcggcggtcgtcggggttagttcgggatttcggtcgtttcggtcgcgtcgggcgtttatatcgtgcggggggcggaggttgttgcggtcgcgttgcgtcgggggttgttcggacgtttagttcgcgcgggtcgaggcgcggggaggtagggcgggaggaggagggattaggcggcggaggagggatcgggaggagtagaggaggaggagaatgcgaggaggagggaggagaattagtagcggggatttaaggttagcggtcgtcggaggcggtggatagcggtggttttcgcgggatttagttttcggcgggagtggggcggcgtatgggaggggagcgggtgttttgaggagttaattttcgagaggggcgtttttagtattgtttttttggattcggttttcgcggatttgtaggtttagtttatgtttaggtcgagttaaatttgtgttagggtttttttttttttttttttttttttgttttataaagtaaatttgtattagttttagatagattggtcgagttttagagttagcgtcggataatggtatcgacggggaaattgtttttttattcgggtttttattttttttgtagtattacgggattttttcggggattagaggttggtttggtagttgaggaggtcgtcgtgttcgcgcggtaggggtgttaggcgttcgaggtggtgttttaaagttcgagggttttttagattttgttaagtattttcgaaattatttgaaatgagggtatttaatttcgggtgtagagataggtttttttaatgtttattgtaattagttatgggtattttgaagttaatgtgtgaagtatattatttcgtaaaagtgaagtttttggaataaaggtttgatataaatagtcgtggaggtgtttttagagaggttaagtgttttattgtttttgtagttttcgtaggagaaatgttagggaaattcgcggaagttttggttaaaagaaattgagtttttttgggttgtaggaatttgagttatatttttttggtaagtttattttatttttattgtttttttttttgtagtaaaaatgttttttaggtttatgttatagttagattttttttttttttacgagatttattaggatttttaggtttggtttaataattttgatttttcggttttgttaaaaattataattttgaagtaagtgaagttatagatttgttttttgttgtttttgaaggggagtaattttatattttttttttttatttagtaaaatgtttgtgtttgggtttcgtattttgtagtttgaacggtggggttttttattagggtaagcgtagatagatataggtttgtttattgttcgtataatttggaatttttttgtgaattaggagaagtaatttgtttttttgttttaataaattagtatagttattgtgcgttgaagttatgttttgaatgtagaggttatgaaggttttgtaggtatgtgtgtgttttttgtatatttgggttgagagtagttcgtagaaatatagaaaataaaattagagaaaggtaaatgggaagtataatagtggaatataaaatgaagataggagtgagttttataataaaagatttgaatataataaagttttgtgtatttatttaataagggttgtaaatttggttttaaattatattttttgttaagggaatgtgatttgtgtgtataagttataatataaattaatttaagttataattgatttgtaagattgtataggaatttttttgagtgtttaaaaagatagtatgtaagaatattagtttttattacgttaggattatatgagataatagtttttatagtacggtttgtatattttttaatgtgatttgatagtattataagaaatagagttttttgtaaagaattattagatatatatatagtataatattgggatggattttagggaatagagaagaatgggtttgttgaatatttttatgggatatttatgtaaagtttgagttttttttttgagtttttgatataaaagttgatatttacgttgattttgtagtttttggttagtatttggagtgtgttgataattgtgttatttggtaagtaaaaaattgtatggtcgagtaggtattaatgaagtttttttaagagagataagtagtttggtatagttagggttttgtatagttagggttttagtttatagtttttgtggagggtggttttagattatggttcggatagaggttgggtgtgtgtgttattattataggaatgataatagtggtttagttgttgtgttaagtattggttagattaagtttatttgataatttgtgagttggttaatatttgtatttgttttttatagtaatgtgatgttgtggtcgggagaagtgattaggatattaaggtatatttgttagtatgagaggttaattttgaatttaaggtagagtcgtgttttattttttttgtttagtaacgttttaaaatttgagataaatggtgatgttaggatttaaaattttattttataatgttttggaaatttgttagggtgagtaatattaaaatttttgtttggttaaaaaaattatagataaagtttttatgtatgttatattagtaagtatgtattaagattttagtattttttttaataaattttataagcgtttgttaattttaataatatagatggttttatttttttgttagttgtatatgagaaattttttttttttgatgagtggttatttttttagaagaagtttttgagtatgttgaataagagtttagttttgtttataaggaatgtggttttgaattttttaaaattaaatgttttgtgaaaggggaggagaaatacgttatttggtagggtgaagatttgaggtttttaaatattttaagttttattttaggtaaaaggtatttgattatttgttttttttggtttagaggttaaagtaaagattgattaggaaaaaaaaatatagtggtagattttagatttttaaaaatatgttttataagttattggagttaagtaaaagtagaataagttatgttagagtggaaagggtttttttgagaaagatttttgtgtaagaataataagtattaatggaggttgtgaattaaggattgatataggttttttttaattttaaagttttttaagaaaatgtatttttaaaataggtttttatttaaatatgtgtttatttgatagtttttttaaggatatatgttaaggagatataagaatttggtaatagttttgtttttagggaggagaattaggtagttcggggttaggggtttagagggagatttgttttttaatttgtttttttgtattattgggattttgtattaggagtatgttttatttatttttgtaaggtaagtgtggtttttgttgaggtttagggatatttttgggggtaggtttttatggtttttgagattgtttattttttttttttgaaggaagttatttgttttgagttttgagttgagatttattttttgtagaatgtggaagaagtagtttttttaaggggtaatgtgttgatagaaaattgttgaagtattttttttttgttattagtatgttttattatttttagagttgagggttatatgttattataggaggtattattggcgttttattttagtaataagtagaaagttgagtaaatcgaaaaattaatatttttttttagtttttttagagaattgaggttattgggtaaattattgttttttaaattggagagataggtaaatatagaagtataatttttagaggaagaaattagtagatagaaatttttaaggatttagtgtcggttgggaaagtttgttttgtaattgagaaattgcgggaggtttagtgtgggtagttttgtaaattaagaattttagtagagtttagttatggtgtagggtagtatgagatatttgagagtgttattttttggagttttgttaggtttttattacgaatattagggggaaaattttattatgtttttggtagtggaaggagaagaggaattattttgaaataggttggaatattttattattaatagaaggtttgtttttaggagaaattattttattagaggtttaatttggtgttttattagagggtgatttatttagagtaagggaaatatataattttatttttttttaatagttttgtattatttaaggggttggggaagttgagaagtaagtatgaagtttatagtttagggatataggtttattggaagattgtgatatgcggtaggattgtgtaatattttttttttttatagtttgttattacgttattagaagtttttttattatagttttttttatttagtatattatttttatattgtaaggtatattaaaaggtaaagacgtagtttgaagagattgtataagtattagaattagaatgagatatgatacgaacgttataattaattgttgtggtttgaatgtgttttcgaaaagtttatatattggaaatttaattcgttgtttttatgaatgaatttatatggtttttatggcggtgggttaatttttgtgggagtggttatgttataagagtaagttttttttatacgtgatgtttttttttatgttatgatgaagtaagaagatatttattagatgttagtattaagtttttggattttttagtttttaaattagtttaaattagttttttttgtttataaattatttagtttgtggtattttgttataattatagtaattggattaagatattattatatcggagtattaattataaaaaaattatgattaataggttaggagttttaatggaaaaaataggtaatatgtaagattagatggataatgtaagtagagttatggaattttttttttttttgagatagggtttggttttgttgtttaatttagagtgtagtggcgtgattttggtttattgtaattttaattttttaggtttaggtgattt

SEQ ID NO: 37 - DNA, 3720 bp, Artificial Sequence
  chemically treated genomic DNA (Homo sapiens)
tgtagttgtttattaaaattttatatatattttggtatataattatattcgttggaatttattttatagatatatttatatttatatagttaaggatgttgattttaataatattggtataagtaaaaagttggaaattgtttatatgtttatggataggggataaatcgattaatttaaggtttttttttataatggagtattatatagttttgaaaaagaatgataagatttttatgttaggatatggtataatttttaagttattttaagtgaaaaaataataataataataatattgtagaataatgtgtatggttggatatatataaatttttttgaaagaatatttaagaaatttaaatgtggttattttaggagttaggaatgaggtaggtggagaggagggatttttattttttaatttagaatatattttgttgtgttagttgattttttttttattgttaataagtattatagttttttttaatttaaattattttttttagtataaatttaaaaaaaaaaaatttaaaatggaaaaatatataggcgtgagtaaaagaaatgaatggtaataatttttgtggtttattgagtgcgtttggatatttatgtgtttttagtttttttttataggaaatgtataggtgagaaattgacgttaagggggattgagtgttaagttagttagtggtagagggtagatttaaatttaatacggtttttttttgttgtttttcggtttttgtttttaggtgggaagcgtatttatcggacggtcggttcggtgaggcgtagcgttttagattggcgtattcgcggttttagcgttttacgtttggggagcgcgcgcgtacgtagcggcgcgagtttggcggcggcggcgataataataacgttatagttcgagttttttttttcggagttttcggtatatattttgtgtttatgtttgggtatttacgttacggcggtagggtcggggttttttaaaatggtagtggttcggggagtcggaagttcggagttagcgtcgtcgtagttatataagtgggggggttgtgggttgggggagttcggtagcgttttggagaggcgaggagtcgtcgttcgaggtcggtgcgggcgagcgagggcgtcgcggtttttcgattttttttttagaggtgagtgttcgaagttaggagttcggcgtttataggtttgtgcgttgcggggaatttttatcgttagttttttcgttattcgcgcgtttttaagtttagcgggcgaggtttcgggcgttttatagtcggcgtcgcgttatgttttattttagcgagtttttcgaattcgacgcgtttttcgttaagtttattgaaggttgttgcgtcgaatttagcgttgaattgtttcggttgtttgttagggacgttttcgcggttatcggttattttggaggtaaggagggcgagtaggggtgtttagacgacgacggcgtagcgcgggggcgtattatatttgagaattaggagggattgggatattggagttatgagaataggggcgatgggaagtttaggagttttggggtgcgtatttttatttttatttatattgggtcgttagcgttttcgtaggaatttgtgcggttatcggagcgtttttttgtttgtgtacgtgtgttttgcgtgtgtatgtttttatgtgttttttgggacgtatgcgggtttttgttgaattagaatgtgtaaaaggtattttgtgtatattcgtgggtattaagagttttgtaggtaggggttgtggatttaggtgtattttttgatgtgtttagagttgatttttgttttttttttagtaggcgattttttgagttgggttttgaatagttgcggcgtaagtggggatttagtcgatttttgttttttggaggggtttgcgtttatattttttttcggttttagttatagcggtagtttttttatttaggtagtgttcgaatattcgtacgattcggaggtattttttaattttatgtcgggcgttttaggtttggtattttttttcggtttagaggtagtagcgtttagattttcgttggatgtttttttttttgcggggttcgatgttttgttgtcgggttcgtcggatttttatttttcggatttgggcgttgttttttttttagaggcgttttgggaggtttcgttttgcgcgggtgttttttcgtagtgtttgtatgagttttagtttttttcgttcgacgttaagttcggttttcggcggtttttcgtttcgttagcgttggacgttgtttttgtttttaagggtttttacgcgttttgggagttgttttttgtgggggttttagggaattgtgggttatagggagattattaggtcgtttcggaggttcgttttttcgtaatagggattaagattgaggatttgttgtttattagttgttttgcggaattgtcggtcgttttagttaatagattttattttagcggggtttatgacgttttttcgttggtttcgggtgatttaggggagggggttgagggtttttttgggtttttgattttttttagtggggagggagggagtagcggcgacggcggagagtttttggttagtacgtagttttagtttttttcgttgggttttcgtagcgtcgtcgcggcggatttttttaaatttttggtggcggatatttttggaagtagtggcgtggttgtattattcgtgtcgtcgtcgtcgtttattttttttttttaggttaaggcgcgacgtaaggggcgtcgcggcggtaaatgtagtacgcgttgtttttgttcgcggtcgtacgttaaggttttcgtttgttcggtggagagttgtgtgcggagttttgcgcgtttcgacgagtttaatcgttatttgcgtatttatacgggttataaatttttttagtgtcgtatttgttttcgtaattttagtcgtagcgattattttattagttacgtgcgtatttatatcggcgagaagttttttgtttgcgacgtgtgcggtcgtcgtttcgcgcgtagcgatgagaagaaacggtatagtaaggtgtattttaagtagaaggcgcgcgtcgaggagcggtttaagggtttcggtttttattcgttgggtttttttttcgtttttttttgagtaagagatgggtttatgggttggggcgtcgtcgttcggcgcgtacgagtttcgggtcgttttttttttcgttttttttttaattttttttcgtacgttcgagggtcggttttcgtttcgtttttagtttttttgaagcgttcgtcgtatacgttttatttagtattagttcgtcggatagttttcgcggtttaggcgttgttatttttgttagtcgcgttttgggggaagttttttgagattatttagtgaataggtattattttgggatttaagatagttttttgtaattgtatacgttttacgtttttttttataatttttagagataggttggggtaggttaaggcggtttcgcgcgggattttgtatagtagtgttttatttagtagtcgattggatgtaacgttttgttttgggttttttttttttttgttgttgttaatttttgtaaagtagacgttatttttaagtagttgataaaattgtttatttttgtaattaaaattattgtgttaaaagtttattgaatttgttatgtaagttttt

SEQ ID NO: 38 - DNA, 3720 bp, Artificial Sequence
  chemically treated genomic DNA (Homo sapiens)
aggagtttatatggtagatttagtaagtttttagtataataattttaattgtaaaaataaatagttttgttaattgtttgagagtagcgtttgttttataaaaattaataataataaaaggaaaaaaaatttaaagtaaaacgttatatttaatcggttgttggataagatattgttgtataaagtttcgcgcgagatcgttttggtttgttttagtttgtttttgggggttatagaggaaggcgtggggcgtgtgtagttataaaagattgttttgaattttagggtagtgtttatttattgggtggttttagaagattttttttaaagcgcggttgataagggtgatagcgtttggatcgcgggaattgttcggcgagttggtgttgaatagggcgtgtgcggcgggcgttttaaggaaattggaagcgggacggaggtcggttttcgggcgtgcgaggaggagttggaagaagagcggggaggggaacggttcggaattcgtgcgcgtcgaacggcggcgttttaatttataaatttattttttgtttagagagaagcgaaggagaggtttagcgagtaaaagtcgaggtttttgagtcgtttttcggcgcgcgttttttgtttgaggtgtattttgttgtgtcgtttttttttatcgttgcgcgcgaagcggcggtcgtatacgtcgtaagtaaaaggtttttcgtcggtgtgggtgcgtacgtggttggtgaggtggtcgttgcggttgaagttgcggaggtagatgcggtattggaagggtttgtggttcgtgtggatgcgtaggtggcgattgagttcgtcggagcgcgtaaagtttcgtatataattttttatcgggtaagcgaaggttttggcgtgcggtcgcgggtagaagtagcgcgtgttgtatttgtcgtcgcggcgttttttgcgtcgcgttttggtttgggggaaaggggtgggcggcggcggcggtacgggtggtgtagttacgttattgtttttagggatgttcgttattagaggtttagggaagttcgtcgcggcggcgttgcgaaggtttagcggggaaagttgaggttgcgtattggttagaaatttttcgtcgtcgtcgttattttttttttttttattaggaggggttaggagtttagggaggtttttagtttttttttttaagttattcggggttagcgggaaagcgttataggtttcgttgggatagagtttgttggttgggacggtcggtagtttcgtagggtagttgatggatagtaagtttttaattttggtttttattacgggaaaacgagttttcggggcggtttggtagtttttttgtgatttatagttttttggggtttttatagaaagtagtttttagggcgcgtagggatttttgaaggtagagatagcgtttagcgttggcgaggcgggaggtcgtcggaggtcgggtttgacgtcgggcggggagagttgaggtttatataggtattgcgagggggtattcgcgtaaggcgaggttttttagaacgtttttgggaaaggggtagcgtttagattcggggagtaaaggttcggcggattcggtagtaaggtatcggatttcgtaggaaaaggggtatttagcggggatttggacgttgttgtttttggatcggggaagggtgttaggtttaagacgttcgatatgaggttgaagagtgttttcgggtcgtgcgggtgttcgggtattgtttgaatgaagaagttatcgttgtagttgaggtcgggagggggtgtgggcgtaggtttttttaggaagtaggagtcggttaagtttttatttgcgtcgtagttgtttaaagtttagtttaagaagtcgtttgttgaggagggagtaggaattagttttgggtatattaaagggtgtatttgagtttatagtttttatttataaaatttttggtgtttacggatatatataaagtgttttttgtatattttgatttagtaggggttcgtatacgttttaaggagtatatagaaatatgtatacgtaaaatatacgtgtataggtaaaagggcgtttcgataatcgtataggtttttgcggaggcgttggcggtttagtgtgggtgggaatgggggtgcgtattttaggatttttaagttttttatcgtttttatttttatagttttaatgttttagttttttttggtttttaggtatggtgcgttttcgcgttgcgtcgtcgtcgtttgagtatttttgttcgttttttttatttttagggtagtcggtggtcgcgggagcgtttttggtaggtagtcggggtaatttagcgttgggttcggcgtaatagtttttagtggatttgacgaggagcgcgtcgggttcggaaaattcgttaaggtggagtatggcgcggcgtcggttgtggggcgttcggggtttcgttcgttgggtttgggggcgcgcgggtggcggggaggttggcggtaggggtttttcgtagcgtatagatttatgggcgtcgggtttttggtttcgggtatttatttttgggaaaggagtcggggagtcgcggcgttttcgttcgttcgtatcggtttcgggcggcggtttttcgtttttttaaagcgttgtcgggtttttttagtttatagtttttttatttatatagttgcggcggcgttggtttcgggttttcgatttttcgggttattgttattttgggaggtttcggttttgtcgtcgtgacgtaaatgtttaaatatggatataggatgtgtgtcggggatttcgaaaaggaaagttcgagttgtgacgttgttgttgtcgtcgtcgtcgttaggttcgcgtcgttgcgtgcgcgcgcgttttttaggcgtggagcgttggggtcgcggatgcgttagtttggggcgttgcgttttatcgggtcgatcgttcggtagatgcgttttttatttggaggtagaggtcgaggggtagtaggggaggatcgtgttgggtttgaatttgttttttgttattaattagtttgatatttagttttttttaacgttagttttttatttgtgtattttttgtggagagaaattgagagtatataaatgtttaggcgtatttagtaaattatagagattattgttatttattttttttgtttacgtttgtgtgtttttttattttaagttttttttttttaaatttgtgttaggaaaaataatttaaattaaaaaggattgtaatatttgttaatagtaggaggaaagttaattagtataatagggtatattttaaattgaaaagtaaaagttttttttttttatttattttatttttagtttttgaggtagttatatttaagttttttgggtatttttttagaagaatttatgtatatttaattatatatattgttttgtaatattattattattattatttttttatttgaaataatttagagattgtgttatgttttgatataaagattttgttatttttttttaaggttgtatagtattttattgtaagggaggattttgagttagtcgatttattttttatttatgagtatgtaggtagtttttaattttttatttatattaatgttgttggagttaatatttttgattatataaatgtgaatgtgtttgtgagataaattttaacgagtgtaattgtgtgttaaagtatatgtaaaattttgatagataattgta

SEQ ID NO: 39 - DNA, 14147 bp, Artificial Sequence
  chemically treated genomic DNA (Homo sapiens)
gggggtattgagtaatatatttagattaataatattttataagtgtgagtattattgatttaaatttttttgttggttgtgttttgtgtttatgtttgttttatatttattttttttagagttgttttttttagagttttagtaatttttatttttttaaatttttttagttatgggaaggattagtaggtgttagtggatttaaaagaattttagatttgttgagatttttgatttttggtgtttagattaattagtaaatagtttaattaaacggtttgtttttatggttaatataattttgaattggtggttatttagattaagtttattttgtttttgagacggaattttgtttttgtcgtttaggttggagtgtagtggtgcgattttggtttattgtaatttttgttttttgggtttaagggatttttttgttttagttttttaagtagttgggattataggtatttattattattttcgattaatttttgtatttttagtagagatagggttttgttatgttggttaggttggttttaaatttcgattttagatgatttgtttattttagtttttttaagtgttgggattgtaggtgtgagttatcgcgtttagttaaagtttagtttgtataagaaggttttttttgttatgttataggatttttgagtttattaaatagattttaatgttttgagattttacgtatttttttaaaatgaagtatttaaattgttagtgtttgtttttttgtttggtttttttgatgtattgatttggtttgttagtgtgatgaaaaatatggttgagttttattgttttattgtaattagtaggattgtttagaagtttaatttttttaagagatgaagatttgagtttatgtagttggttgttttttaaaaatatttggttatttgggatatattttgaattaattttttggttattttatgtgattaaaagtgttagttttttttgtttttagtatatttttttgtttgggaagtggaagggatgaaatttttatatttttttttgatgatatagaaaggagtatatatttatattttatgaatagatatgtaattatagaagaaatagtttaacggtcgggcgcggtggtttatatttgtaattttagtattttgggaggtcgaggtgggtggattacgaggttaggagtttaagattagtttgtttaagatagtgaaatttcgtttttattaaaaatataaaaaattagtcgggaacggtggtaggcgtttgtaattttagttatttaggaggttgaggtaggagaatcgtttgaattcggagggtggaggttgtagtgagtcgagattacgttattgtattttagtttgggcgatatagtgagattttattttaaaaaaaaaaaaaaaagtataattatatgattatttatattgttttatatattaaattagtagtaatttgttttttatatagtaaataaaaataaattagtagtaataaatatattttttttgtgttatagttagtatttggtgaattttgtattttttttttttttaaagtgttgaatttataggtttttataaggtaagtttatattattaattaattttgtttttttttttgatgttaaaattgttttttaggagttgattaggtttatttttttgttttttaagtattatttttagaatatttttgaaagtatttttgttttttggtaataatatttatattttatttattttttgtttttaaatatatatttagttaattttaggttttttttaatggagtagttatttatttatttaatatacgttgggtgttttttttgtgttatatattgttttggtttttggggatagagtaggaaataaaaaaaaataaaatttgtttttatatagttgatattttagttaggggagataaataataaataaatgaatgatgtagtatgttagatgttgatagtgttatggagaaagtatattatggagattagaagtattatttgtaatggaatagttatgattttaagaagaatggttgattggatgtgaagtgtgagagagaggagtttaggtttttggttgagtaattggagggatggagttgttattatttgagatggagaagttaggggaggagtagatttggaggggaaggttaggaatttagtttggaatttgttaagtatgaggtatttattaaatattgaagtggatttttagaagatgttattaaaattagttaagtttaggagagagttttgggttagaaataaaaatgtgggagatattggtatatatatgggtttatattatttttttttttaatttaatattttattttattgttttttgtttttttaatagtatttagttttatttattttttaaattgatttttatattgatagtataataaaatttatattttttattatattaagattttgtgtgatttaatttttttttattttttggattttgttttaggttattttttttttttatttaatttttaatattttgattttattgttttttaaatagttttttgttgttttttgttttttttgtggaaaaggtttttttattgtttaattattaggtatttttcgatttttttttattttttatttttgagaaaggttttttttgattttttatattaattaggatttttttgggcgagatttgatttaaattggtttagagaaaaggagttaattgattggtttatgtaatttaattttttttttttgttgtaatttttttttggtttttattttatttaaggttaaagttagggtttttattatggttttgtaggttttatatagtttgttttttttattatttttttgattttattttttatattttttttttatttatttttttttagttagagtggtttttttgttgtattttaaatatgttaggtatatttttattttagtgtttttgtgtttgttgttttttgtgtgtggaatatattttttatatagttatattatttaaaatttattgtttttaagtttttatttaaatgttttttcgtgaagttatttttgagttttttttaaaattgtagttttttatttttgtattttttattgttttttatttttaatttttgttattgtagttagaattatttgatatatagtttttattttattggttttttgttatgtttttttttataagaatttgaagtttattaggtcgggagttttgtttgttgtgtttgttgttattttttagtgtttaaaattgtttggtatatagtaggtatttaataatttttgaattagtgaaaattagatggtggtttggtatttttatataggaatgagttaggtggaaattatttaggatataagtagattttgaagtgataaggaagggttattataattatgtggggtttattttgtttttttttgttttttttttttaggtttagtaatagttttattaaggattttatgaatattaaagtttatatttatatgttgttagaggtgagagtagtttattttattattagattttgtgtttagggtggtgatttgaagaaggaagagagcgaaagaagggaaggattatttttttttttaaattggagttaagggagggaggttagagtaagtttgggggcgtaatttagatttagtttttgtttaattttttttgtttttttttttaggggtttagagaattataaggtttgtagaattttttagagaagttttattattgattttttttttttatttttagatattaaagagtttgaatgtttttgagttatatggtttttttttttttttataaattttgttagttgttacgggggtttgtttttagggtataaagttattgagagatttagagatttagtttttttgtggaatttttaaaatgttttagtagttttgtttttagtttgttgtttggtagtatttgttagttgattttatgtattgtttttttttttgttattttggtaatttgggttttttattttatttttttttttatttttttttttagacgttattttttgaattgttatagagaatgggttaatttatggtggaggtttgtttatttttataataattaaagggttttaaggtttacgtttttatatatttaattattttttaggtattttaaattatatttaaattttaatttagttttattttgttttagtttttgtttgtaagtgttttagtttttaatgggtatagatttggatttcgttttttttagtcgggtttttattttaggttgagtttagttatcgttaattaatgtagagttaggttttttttttttttaattttggtcgtagtttaattttgttttttgaaagtatttcgtttttgttatttaatgttttttcgtgtgtttgatagttattttgtttttttattttcgttgtgttttaaattcgtttttatttagttttatggttttgtttaatcgtagagttgttttgttcgtttacgcggagtttagttcgatttattttcgtcggttgttacgtttatttttatataagttttgttttcgttgagtagtatggcgtgcgatatcgtttttttggtgttttggtaggggtttagaagtttttcgttcgttaattagagaaaaatagggttatttattttcgtttttgggggttgttttttattaattttatgtaagttaattagtgtgaggtagattttcgttttttcgatataggtttcgagtttttttagttgtttatagttcgttagtttttgagttaatcggcgtggagtatcgtgaaggtcgaacgcgttttttcgggattttaggggtcgtgagcgttttattatttttttttacgttaattacggtatagttttgtagggaagggttcgttttttaatttttcgaggttttgcggtcgattaatagcgttttggttaattagcgagcggcgggatattgggtttttttttttcgggtttacgtgagttgtagggaaacgtaggggcggtttttaggtgttgtcgtcgttatcgttattattatttttatcgtcgtttcggaatttaggtttggggggcggtggggtcgcgtatggagttttcgtttttcggagttgttaatattgttaacgttatcgttacgttatatataggtgagttttgggtttggagggtggagggtttagttcgtgattttacgtatttttttcgttttcgcgtagaggatgtggtttggtcggtggtttgttggtgttcgatttttcgtcgttattattacggttggtggatttgcgtgtggtattgtttaagtttttcgttttttatagtggatttgatcgtggtttaatttttttttttcgttgtataatggatcggtttgcgtgtttatgtttttttttacgttaatttagggtggattcgtttataggttttttttttatttttatttttattcgttttttatttatttttatttatagggagttagtttgtgatagtgtttagtttttttaatagtaggtgtatttgagtgtttggattttttttagttttaatttttaggagattcgttcgtggttttatttattttattttttttgtatatcgtagcgaattaattcgtggcgtcgtattttttcgtatttttttttaatagtgagtttatttgagtttgtatttttgttttttttagttttttaatgtattagtttatggttttttttaaaattattttttttttttattattattattattattttatagtggattagtttttatgtttggatttacgtttttttagttattagtttattgttttgttttttttttttcgtagattgtcgttttagcgtttggggtttttttttttttaatagtgggttagtttagtgttttatatttttttatttttagtagtttagtttatagttttttttttttttgttttgaattagtttgtgtgatggtttttttttttttttattgtggtgtaggagtttgtaaggttttttgttttttttttttttagacgatgagttttattatttttttttttgtagtggatttgtttattggttttttttttttatatttttgtatgtttgtatagtttttcgtatattttttcgtgagtttagtgttttgtaattgggggaagatcggtcgtgtatttttaatttttttttttttttttttttttttttagaagagaacgtgttgatttttttttttttgtgatggagtattgtacggttttttttgttttttattttttaatagtgggttagtttggttatattcgtaattataaagacgttttgttttattataataagtgaatatattagcgttagtgatgatagtaatgttaataggagttagcgtttattgagtatttgtcgtatattaggtagagtgttttatatgaatgagtttttttaatttttattataattttatgagataggtagtgagggaattgggttatagggaggttaaattttttatttaaaggtggtttaggaagtatttaggatataggataatttttgaggttttttttttagattttattttattttacgtgaggttttagtttttaaaaattaaattagtttttatttttaagtttttgtttttgttgttttttttgtttgtagagtagtttttattttttatttttttttagtatttatttattttttaattttagtagttgtgtgattttagatgagtgatttaattattttttttttgtgtttttttttttatttgtgaaatgggggattagaattagaattttttttagtgtaaataaatattaattgtgaattaatggtaaaataagtaatttttttagtattatcgtttatatttttttatttttttattgtgttttaattatattggttttattatatagttttttaaatatagtaggtatgggttagttttagggtttttgtattggttgttttttgtgttttgaatattatttttagatttttgtatggttttttttagtattttgtttaaatattaatttttaaaggatgtttattatattgtggtgtgtggaatgtagtataaaaagatatatgtatgaaagatgtttttaagaatgttagtttatatatgagtaagggttttttttttttttaaaaggatgtgtttataagattgaggtacgtaatatgttttgtaaaggtataggtataaaagttgtttttaagagtgttagttgtatatgtgaataaggattgtgttgttgtattgaaagaatgtgtttataaaattgtggtgtgtagttgggtataggggtgtgtatttatagttttagttattcgggaggttgaggtgggaggatagtttgagtttaggagttttaggttagtttgggtaatatagcgagatttttttttttgaaaaaaaaaaatttaaaaaataattattgtggtgtgtgtaatatatttttttaaaggtataggcgtaaaagatgtttttaagagtgatttgattttgttgtatttgggtagtgttattttattaaaggttgattgttatattatggtatttagaatatattatataaaggtatatgtataaaaaagaagtttttaataatgttatttgtaaaaataaaaaaagttaatttttttttgattatttgaagttgtatatttagtagggtttaagttaggtttttgatttgtttcgttgttttttattattgtttgatatattgtgtgggttatttgtttgttgtttgtttttttttattagaatgtgagttttatgaggatttagtttttgtttgtttatttatcgttatgtttttagtaattgaaaatgtattaggtaaatagtagatgtttaataagaatttattttatgaataaatgggaaaaagataatttgagatattagtgtaggggttatatgaggaagaagaagggatatgagagttaattagttgggattgtttttgtaattaatttttattgagttttttgtgagtattaggtatttttttaggtgttggaatatggtaaggaacgaaatagggcgaaatatttgtgtttgtggagttgatatttattaaaagttggggaggttgggtacggtggttaatattagtaattttagtattttgggaggttgaggtgggtggattgtttgagtttaggagtttaagattagtttgggtattacggtgaaattttatttttattaaaatataaaaaaattagttgggtgtggcggcgtgcgtttgtaattttagttatttgggaggttgaggtaggagaattgtttgaatttaggaggcggaggttgtagtgagttaagattgtattatgtattttagtatgggtgatagagcgagattttgttttaaaaaaaaaaaaaaaaaaatttaagttggggagatagattatgtgaataaaataaataagtaaaattagtataatagataaatgttgagaagaaataatgaaatagggtaggtaggaatcgagtattgggggtggttgaaattttaggtatagggaaggtgatttttgaattagggttttacggtagagacggagagagttttaatgtttacgggaagagtatattaggtagaaggaagtgttagtttagaggttttgaggtgggatggtgtttgttatgtttaaggaatattaaggcggttagtgtggttggagtagagtgcggggaagggtagaaggtgaggttatataggtgatgggagttagatagtgtaggtgatatataggataggattgtaggggtagggggagaaggatgatatattagttaatagttaatatttgtggagtatttgttatatattagaggtatttttttgtttaaatattaatttttaaaggatgtttattatacggtggtgtttggaatgtattataaaaagatatatgtgttaaagatatttttaagaatgttagtttatatatgaataaggattttttttttttttaaaaggatatgtttataaaattgaggtatgtaatatgttttatggaggtataggtataaaagttgtttttaagagtgttagttgtatatgtgaataaggattgtgttgttgtattgaaagaatgtgtttataaaattgtggtgtatagttgggtatagaggttgaggtgggaggattatttgagtttaggagttttaggttagtttgtgtaatatagtgagattttcgttttcgaaaaaaaatttaaaaaataattattgtggtgtgtataatatatttttttaaaggtataggtataaaagatgtttttaagagtgatttgattttttggtatttgggtagtgttattttagtaaatatttattgttaaatattatggtgtttggaatatattatataaaggtatatgtataaaaaagaagtttttaataatgttatttgtaaaaataaaaaaaaaagttaattttttaagttttttatagaagtattttatagaattgatatagttaatttttatagaagttttggagggtaggtgtatttttgagaatatttgattttgagagtaaaatatttttattttatagatgaggaaataagtaaagagaggttgagtaatttgtttagggtaattttgagttagaatagttagaataggggtagaggaatataaggttgaagatttagaaagaagaatagatttgtaagggtaggtaggttatttggtatttttgattacgtagaggaagaatgaattttttttggaatgcgatgattgtgtaattgagtttatgaagtgagggaagagttttttttgcggggagagtagttcgtgtttatttttagaggttggaattgtttcgggaacggtagatagtttagggtggttgttttagagtttttgtatacgtcgttcgtttcgtttgaaggtttttttttatagagggtagtttggtttgttatttttttttttttaggttaggtgttatttttttggggaagaattttttgtatattttgtgtaaaaatagtatttttgttattttttaggattttatttttttttgtttttttttatggagaattggtggtgtaaggcgattgtttattagagttaaattatttaggttttgaatttcggttttgttaatttttagttgtgtgatttggggtaggttatttttttgtatttttattgttttatgtggaaaatgggggaaatgataatttttattttttaacggtggtttgaggatttaatgagttaaatgatttaaagagtgtgtagtttacggtaaggatcgtatgtttggtttgtatttttaaattattaaaatgtatttatagtatattcgtagatgtttgataggtttttgaaattgattatttttaaaattggtgtgattttttttaaaatttatttttttgtaaggtttttattttagttgattataatgttgtttttgtgggtgattaggttataaatttagatttattttggattttttttttatttttttcgggtatgttatttgttagtaagttttattttgtgtttaggttttttttagattttagttatttttcgttagttttattgttattattattatttatcgtagtggtttttttagttttaatagtttgttttttttataatcgttagggggattttgttgaaattttagttatagtttgttatttttttgtttataatttttttgtggtttttgttttatttaatattttgatagtattcgaaaaagtttggtttagtttggttttcgttattttgtttttttttttcgttgttttttttttttttttcgaatttatgttagttttttttttttatgttatttgttaggtattttttagttttgggttttttatatcggttgtcgtttttatttggtttgttgtttttagatatttacgagtttagtttttttatttttttttggtttttgtttagttgttttttttttggcgattatttttttttgattttttatgtaaaagtaatagtttttttttgtttgattttttttttataatttttattattatttgacgtatttttgtatatgtttgtttttttttttatttgttttttttgttaagatgtgagtttttttggagtagggattgttgtttgttgcgttttcgattgtattcgtagtatttggtttatagtatgtatttattaaatgtttgttaagtgaaggagatggaaagaagtaaatatatttaagtaaggtagattattagaatttttatgaggggttaagtgggagaaataataaaatataaagttttgtgtgttgttgaagttggaagtttatcgttattttttatttagttgataggttttgttgtagttgaaagaagaattggtaaaattgtttgtttttgttattaggagttattttgaattttttggatttttgaaataagtttgtttgtaaaataaatttagtgaggtttttggtgataggattttttaatcggatattttatggttttgtgatttgtataattgaataggaagtttatgtttatttttagtttgtttttaggaaagaaagtagtaatggggtgatagggaggattttgttttttgaaggatatgttgagagggaatagtcggtgtgaggggtcgtttagtttaatggtgaaatgtttagttaattggaatttgattgtttggttttaaatgttggttttgttatatgtggtttgtggaaggtacgtagatatttgtgttttcgttgttttatttataagttaatgataggaagattatttattttttagaggtatgattagggataaataagttaatgtttattaaaaaaaaaaataatagtataggtgtatatgtttttatttaaaatttttggggttagatgtgttttagaatttttatttttttatattttagaaaggtaatatgatgtatatacgatgttatataatattttttagtaagttttgtaatcggttgtgtttatatttttgtagtaaaatgtatgaatattcgtaataagtgagatttaataaagattagaaagggttttgttttattttaaattaggttttgttattaaaagagttaaaagaagttttttgtttttagagtattttggatgttggaatggtagataagggattatgaataaattagaaattaatatttagagtttattatatattttaggtatataatatttaatttgtataatatttttgtgaattaggtattgttatttttattttattaatgggtatattattatttttgttttatatatgagaaaattgaggtataaagaggttaaagaatattagttaagcgtggtgttttatgtttgtaattttagtattttaggaggttagggagagaggattgtttgagtttaggagtttaagaatagtttgggtaatatagtgagattttattttttaaaaaaagaaaaagaatatgtttagggttatatagttaataagtggtagaattaggatttaaatattggtaatttggttttagtgtttgggtagttgtttagtaggttatattgtttttttgtttagaagagtgtttgatgtgtattaagtttttaatagatgttaattattgttgttattaagaaagagaatatttagggtcgagtacggtattttatatttgtaattttagtattttgggaagttaaggtgggaggtgggtggattatttgaggttaggagtttaagattagtttggttaatatggtgaaattatgtttttattaaaaatataaaaattagtcgggcgtggtcgtgggtatttgtaattttagttatgcgggaggttgaggtatgagaatcgtttgaatttgggaggtagaggttgtagtgagttaagattgtgttattatattgcgttttagtttgggtaatagagagagattttattttaaaaaaaaagaaaaaaaaaaaaagaacgagaatatttagggatagtaataggatagagagattaggtatttatttagttttaggacggttttataaaggaaaggatttttgggttgggatttgaaagataagaaagattgttaggcgaaagaaggaagttttacgtggagtgagtagtttttgtaagggtttggtaaaaaaaaaattttttgaaaaatttgatattgatatggtagaagatatagataatatttaaatgaggaggatggaattagttttttatttttgttgtaataaataattataaatttagttgtttaaaataatatatttgttattttatagttttgtaggttagaagttttatattggttttagttgaaattaaggtattggtagggttgcgttttttttggaggttttaggggaaaatttattttttgtttatttaagttgttggtagaatttaattttttgagattgtaggattgaagtttttgtttttttattgtttgttagttgatagttatttttagttttaagaggttgtttatagtttttgattttgagttttttttttttatttttaaagttaataatggtaggttgagttttttttatattttgaattttttttgttttttttgttattatatttttgagttatttttttttttttattatttgttttttagagtttatatgattagattgaattttattaaataatttagaaataatttttttgttttagggtttgtaattttaattttatttgtaaagtttttttttgttatgtagtgtaaataatatataggtttcgaggattaggatgcggagtagggttggtattatttggtttattatagtttgttttttgatttttatagatttatatttgttttatatttaaaatatatttatattattttaagatatttatgagttgtattttattatagggagtattttaagtaagattggggagttagaagttagtttgggaaggtttagggaatgatggtagggtttgaagatagagatggagaaaagatgataaaaaaaggaatttttttttcgttgatttttgttttttttatgtttatagttttttaatttagttgtttgttttttagg

SEQ ID NO: 40 - DNA, 14147 bp, Artificial Sequence
  chemically treated genomic DNA (Homo sapiens)
tttggagagtaaatagttgagttgagaggttgtggatataggaggggtagaggttagcgggaggaggatttttttttttgttattttttttttatttttgtttttaaattttattattattttttaaatttttttagattaatttttagttttttagttttgtttgggatgttttttgtgatgggatataatttatgggtattttaggatggtgtgaatgtattttgaatgtgaaataaatgtgaatttgtgggggttagagggtagattgtggtaggttaaatgatgttaattttgtttcgtattttaattttcggaatttgtatgttatttatattatatagtagaaaggaattttgtagatgaaattaaggttataaattttaagatagggagattatttttggattatttgatgaaatttaatttaattatatgagttttgaaaagtagatgatggagaaagaaaggtagtttagagatgtgatgatagaagaggtaggggagatttaaaatgtgagagggatttaatttgttattgttggttttgaagatggaggaaggaggtttagaattaaggattgtgggtagttttttaaagttgggaatggttgttagttgatagatagtaaggaaatagggattttagttttataattttaaggaattggattttgttaataatttgaatgagtaggaaatggatttttttttagagtttttagaaggaacgtaattttgttaatattttgattttagttgagattagtgtgggatttttgatttatagaattgtaagataataaatgtgttgttttaagtagttaaatttgtgattatttgttatagtaagaatagaaaattagttttattttttttatttgaatattatttgtattttttattatattaatgttaagttttttaggaggttttttttttgttagatttttgtaaaggttgtttattttacgtggggtttttttttttcgtttagtagttttttttattttttaagttttagtttaaaggtttttttttttatgaagtcgttttaaaattgaatgaatgtttgatttttttgttttgttattgtttttgaatgttttcgttttttttttttttttttttttttttgagatggagtttttttttgttgtttaggttggagcgtagtatagtggtataattttgatttattgtaatttttgttttttaggtttaagcgatttttatgttttagtttttcgtatagttgggattataggtatttacgattacgttcggttaatttttgtatttttagtagagatatggttttattatgttggttagattggttttgaatttttgattttaagtgatttatttattttttattttggttttttaaagtgttaggattataggtgtgagatatcgtgttcggttttgaatatttttttttttgatgatagtaataattaatatttattgagagtttaatatatattaggtatttttttaagtagagaggtaatatggtttgttggataattgtttaggtattagggttagattgttagtgtttgaattttggttttgttatttattagttgtgtgattttgggtatattttttttttttttttaagaaatggggttttattatgttgtttaggttgtttttgaatttttgggtttaagtaattttttttttttggttttttaaagtgttaggattataggtatgaggtattacgtttggttgatattttttaatttttttgtattttaatttttttatgtgtaaaatagggataatgatatgtttattagtaaaatggggataataatatttagtttatagagatattgtatagattaaatattatatgtttgaggtgtatgataagttttaaatattagtttttgatttgtttatagttttttatttgttattttaatatttaaaatgttttaagggtagaaagttttttttaatttttttggtggtaaaatttgatttgaaatgaaataaggttttttttggtttttattgaattttatttattgcgagtgtttatatattttgttgtagaaatatgaatatagtcgattatagagtttattaaggggtgttatgtaatatcgtatatgtattatgttatttttttgaaatgtgaagaaatggaaattttgaaatatatttggttttaggggttttgggtaagggtatgtatatttgtattgttatttttttttttaatgggtattgatttatttatttttgattatgtttttgagaagtaggtagtttttttgttattaatttataaatgaggtagcggaggtataaatgtttacgtattttttataggttatatgtggtaaagttagtatttggagttaggtagttaggttttagttgattaagtattttattattaggttaaacggttttttatatcgattatttttttttagtatgttttttaaagaataggattttttttgttattttattattgtttttttttttgagagtaaattggaaataaatatgagttttttgtttaattatataagttataaagttatgaagtgttcgattagagagttttgttattagagattttattgaatttgttttgtaggtaggtttgttttagaagtttaaagagtttagagtgatttttggtggtaaagataggtaattttattagttttttttttagttgtaatagaatttattagttgagtgaaaggtgacggtgggtttttagttttaatagtatatagggttttgtattttgttattttttttatttgattttttataagagttttagtaatttgttttgtttagatatgtttatttttttttattttttttatttagtaagtatttggtgagtgtatattgtgggttaggtgttgcggatatagtcgagaacgtaatagataataatttttgttttagaggagtttatattttagtaggaaaggtagatgagaaaaaaggtaaatatgtataagagtgcgttagatggtggtaagggttatgggaaaaaaattaagtaggggagagttgttatttttatatggagagttaggggagagtagtcgttaaggaggggataattgggtagagattaaaaggaggtgaaggaattgagttcgtgagtatttgagagtagtaagttaggtggaagcggtagtcggtgtgaagggtttaaggttggagagtgtttggtaggtgatatggggagaggaggttgatatgggttcgggggagaggagggaggtagcgggagaggagaatagagtgacgggggttagattgagttaggttttttcgggtgttgttaggatgttgagtgagataggagttataagagggttgtgaatagagggatgataggttgtgattgagattttaataggatttttttggcggttgtgagaagaatagattgttggggttgaagaagttattgcggtagatgatggtggtagtagtggggttggcgagaagtagttggggtttggagaaagtttgaatatagaataggatttgttgatagatagtatgttcgggggaggtgagagaagggtttagggtgagtttaggtttgtggtttaattatttataaagatagtattgtggttagttgaggtgggagttttgtaggagagtaagttttgaggggggttatattagttttggagatggttagttttagaggtttgttagatatttacgggtatgttatgaatatattttaataatttaaaaatgtaagttaggtatacgatttttatcgtgggttgtatattttttgaattatttaatttattgaatttttaaattatcgttaaagggtggggattattattttttttattttttatatgaggtaatggaggtatagagaagtaatttgttttaagttatatagttggaagttggtagagtcggaatttaaaatttaagtggtttggttttagtgagtaatcgttttatattattagttttttatgaagagaaatagagaagggtaagattttagagagtgataggaatgttgtttttatatagggtgtataaggagtttttttttaaggaagtgatatttggtttgaaggaggggaggtagtaagttaggttgttttttgtgggggagggtttttaggcggagcgaacggcgtgtataaaggttttgaggtagttattttgaattatttatcgttttcgagatagttttaatttttgagggtaagtacgggttgtttttttcgtagggagagttttttttttattttatggatttaattatataattatcgtattttaggaagaatttattttttttttgcgtgattaaaggtgttaaataatttgtttgtttttgtaaatttgtttttttttttgagtttttagttttatgtttttttgtttttgttttggttattttggtttaaggttattttgagtaagttatttagtttttttttgtttgtttttttatttgtaaaatggggatattttatttttaaagttaaatatttttaaaagtatatttattttttaaggtttttgtgaggattaattgtgttaattttgtaaaatatttttgtaaaagatttgaggggttgatttttttttttgtttttataagtagtattgttaggaattttttttttatatatgtgtttttgtatagtatattttaagtattatagtgtttaataatgaatatttattgaaataatattatttaggtgttagaaaattaaattatttttagaaatattttttatgtttgtgtttttaggagagtgtattatgtatattatagtggttattttttgggttttttttcggagacggggattttattatgttgtataggttggtttggaatttttgggtttaagtgatttttttattttagtttttgtgtttagttatatattatagttttgtgaatatatttttttaatgtaataatatagtttttatttatatatataattagtatttttagaaatagtttttatatttgtgtttttatagagtatattatatattttagttttgtgaatatatttttttgaaaaggaggaaaatttttatttatatataaattggtatttttagaaatatttttgatatatgtatttttttgtagtgtattttaggtattatcgtgtggtaaatattttttgggggttggtatttgaatagaaaagtgtttttgatgtgtggtagatattttatagatattagttattagttagtgtgttatttttttttttttgtttttgtaattttattttatgtattatttgtattatttggtttttattatttgtgtgattttattttttattttttttcgtattttgttttagttatattggtcgttttgatgttttttgaatatggtaggtattattttattttagggtttttgaattggtatttttttttgtttggtatgtttttttcgtagatattaaggtttttttcgtttttatcgtgaggttttaatttaagagttattttttttatgtttaagattttaattatttttaatattcgatttttatttgttttattttattatttttttttagtatttgtttattatgttaattttatttatttattttgtttatatagtttgtttttttagtttgggtttttttttttttttttttgagatagagtttcgttttgttatttatgttggagtgtatggtgtaattttggtttattgtaattttcgttttttgggtttaagtaatttttttgttttagttttttaagtaattgggattataggcgtacgtcgttatatttagttaatttttttgtattttagtagagatggggttttatcgtgatgtttaggttggttttgaatttttgagtttaggtaatttatttattttagttttttaaagtgttaggattattggtgttagttatcgtgtttagtttttttaatttttaataaatgttagttttataagtataaatatttcgttttgtttcgttttttgttatattttagtatttagaagagtgtttggtatttataaggggtttagtaaaggttggttgtaggaatagttttaattaattagtttttatattttttttttttttttatgtgatttttatattggtgttttaaattattttttttttatttatttatgggataaatttttattgagtatttgttgtttatttggtatatttttagttgttggagatatagcggtgaatgagtagataaaaattgagtttttatgggatttatattttaatgaggagagatagataataaataagtaatttatatagtgtgttagatagtgataaagggtaacgggataaattagggatttggtttgagttttgttgggtgtgtagttttagatggttagggaggggttgattttttttgtttttataagtagtattgttaggaattttttttttatatatgtgtttttgtatagtatattttaagtattatggtgtgataattaatttttaatgaaataatattatttaggtataataaaattaaattatttttagaaatattttttacgtttgtgtttttaagagagtgtattatatatattatagtggttgttttttgggttttttttttttagaaaaagggatttcgttatattgtttaggttggtttggaatttttgggtttaagttatttttttattttagtttttcgagtagttgggattataagtgtatatttttgtgtttagttatatattatagttttgtgaatatatttttttaatgtaataatatagtttttatttatatatataattagtatttttagaaatagtttttatatttatgtttttatagagtatattacgtattttagttttgtgaatatatttttttgaaaaggaggaaaatttttatttatatataaattggtatttttagaaatattttttatatatgtatttttttatattgtattttatatattatagtgtggtaaatattttttgggggttggtatttgaatagagtgttgaaaggaattatgtagagatttgggggtggtgtttaaggtataaagaatagttaatgtaaaggttttgaggttggtttatgtttgttatgtttgaggagttgtgtggtggaattagtgtggttggagtatagtaagggggtgggaaggtataggcggtaatgttagaaaggttatttgttttattattaatttatagttaatatttatttatattggaagggattttagttttgattttttattttataaatgaagaaaaaggtatagagaggaagtggttaaattatttatttaaggttatatagttgttgggattggggggtgggtgggtgttgagagaaggtgaggaatgaagattgttttgtaggtagagggaatagtaagaataaaagtttggaggtgagaattaatttggtttttaaggattgaggttttacgtggggtgggatgagatttaagaggggagttttaaaaattattttgtgttttgagtattttttgggttatttttgagtaaggaatttaatttttttatggtttaatttttttattatttattttatggggttgtggtgaggattaaaggaatttatttatatgaaatattttgtttgatatacggtaggtgtttaataaacgttagtttttattggtattattattattattggcgttaatgtatttatttattgtagtgaggtagaacgtttttgtggttacgagtgtgattaggttgatttattattaagaggtggaggatagggaaggtcgtatagtgttttattataaggaaaagaggattagtacgtttttttttgggaagggaaaaaaaaagagaaggaaattgaaagtatacggtcgatttttttttaattataaagtattggatttacgggagggtatgcgggggattgtgtaagtatataggggtgtgggggaggaaggttaatgaatagatttattgtaaagggaggggtgatgaggtttatcgtttgaggggaaggggagtagaaaattttatagatttttgtattatagtgagaggagagaaaagttattatatagattgatttaaagtagagagggaaaaggttatggattgagttattgaaaatagggagatgtaaagtattaaattaatttattattaaaaaggagagaattttaagcgttagagcgatagtttacgaaaaagaggagatagggtaatggattgatagttaaagggacgtgaatttaaatatgaagattgatttattataaaatggtggtggtggtggtggggggggggggtggttttgaaaaaagttatggattgatgtattgggggattggaggaggtaggaatataaatttaggtagatttattgttaaagagggatgcggaggagtgcggcgttacggattgattcgttacgatgtataggaagggtggaataaataaggttacggacgggttttttgaaagttgaggttaggagaaatttaaatatttagatatatttattattaagggggttgaatattgttataggttagttttttataagtgggggtgggtggggggcgggtgggggtaggggtagggggaaagtttatggacgagtttattttaagttggcgtggggaaaaatataagtacgtagatcgatttattatataacgggagggggaggttaggttacggttagatttattataagggacgaagggtttgagtaatgttatacgtaggtttattagtcgtggtggtggcggcggggagtcgaatattagtaggttatcggttaagttatattttttgcgcgggggcgggaaggatacgtggggttacggattgggttttttattttttaggtttagagtttatttgtgtgtagcgtggcggtggcgttggtaatgttggtagtttcggggggcgggggttttatacgcggttttatcgttttttaggtttgggtttcgaggcggcggtggaggtggtggtggcggtggcggcggtagtatttagaagtcgtttttgcgtttttttatagtttacgtgggttcgaggaggaggagtttaatgtttcgtcgttcgttgattggttaaagcgttattaatcggtcgtaaggtttcgaggggttgggggacgggtttttttttatagagttgtgtcgtgattggcgtaaggggaaatgatggaacgtttacggtttttggagtttcgaggaggcgcgttcggtttttacggtgttttacgtcgattggtttaaggattgacggattgtgagtaattgaaaaggttcggggtttgtgtcgggggggcgggggtttgttttatattgattggtttatatgggattgatggaagatagtttttaaggacgggggtgggtggttttgtttttttttgattggcggacgagggatttttagatttttgttaaaatattaagggggcggtgtcgtacgttatgttgtttagcggaagtagggtttgtatagaaatgggcgtagtagtcggcgggagtgggtcggattgggtttcgcgtaggcgggtagggtagttttacggttagataagattatagagttgggtaaagacgaatttagaatatagcggaggtaggagggtaggatggttgttaggtatacgaaagagtattgagtggtagaaacgaaatgtttttagagggtagggttgaattgcggttagagttaaaaaggggaggaatttggttttgtattgattggcggtggttggatttaatttagaataggggttcgattagggagagcgggatttaggtttgtgtttattggaagttggaatatttataagtaggggttaagataaggtagggttgagttagggtttgggtgtaatttggggtatttggggaatgattgggtgtgtgaaagcgtaaattttagggttttttgattgttgtgggaatgaataaatttttattatgaattggtttattttttatggtaatttaaagggtggcgtttaggaaaaggaatggaagaaagggtgaggtggggggtttaggttgttaagatgatagaagagagggtagtgtataaggttaattggtaaatattgttaggtaataggttggaggtaggattgttggggtattttggaggttttatagagagattggatttttgggttttttagtaattttgtgttttaggaataggttttcgtggtaattagtagggtttatggggaaaaagaagggttatgtgatttaaaggtatttaggttttttaatgtttgaggatggggggaagaagttaatggtgaggtttttttgggaaattttgtaggttttgtagttttttaagtttttgaaaaagaggatagaagagattgaataaagattgggtttgggttacgtttttaggtttgttttgattttttttttttgattttagtttagagggaaagatggttttttttttttttcgtttttttttttttttaggttattattttaaatatagagtttggtagtggggtgagttgtttttatttttagtaatatgtggatatgggttttgatatttatggagtttttggtgaggttgttgttgagtttagagaaaagaaataagaaagggtaaaatgggttttatatgattatgatgatttttttttattattttaagatttatttatattttggatgatttttatttggtttatttttatgtggaaatgttaagttattatttggtttttattgatttaaagattattaaatgtttattgtatgttaggtaattttaggtattgggagatagtagtaaatataataaataaaattttcggtttgatggattttaaatttttgtaaagaaagatataataaaaaattaatggaataaaagttatgtgttagatggttttaattataataataaaaattaaaaatgagagataataaggagtataggagtggggggttgtaattttaaagagggtttagggatggttttacggagaagtatttgagtaaagatttaaagatagtgaattttgagtagtgtggttatatggaggatgtgttttatatataaggggtagtaaatataaaggtattgaggtgggagtgtgtttggtatgtttgaggtgtagtaaagaggttattttggttggagaagaataagtgaagggggaatgtaagaggtgaggttagagaggtaatgagggagataaattgtgtgaagtttataaggttatggtaaggattttggttttgattttaagtgagatgggagttaagggaaggttgtagtagaggaaggaggttgaattatatgaattagttagttgattttttttttttaagttagtttggattagatttcgtttaaaagaattttaattgatataaagggttaaggaaggttttttttaagaatgaagaatgagaaggaatcgaagaatgtttaatggttaagtagtaggaaggttttttttataaaaaggataagaggtaataaagagttgtttgagaagtagtgaggttagagtgttagaaattgagtggggagggaaagtggtttaagataaggtttaagagataggaagaggttagattatatagggttttaatataataaggaatgtggattttattgtgttgttaatgtaggagttagtttgaggggtaaatgaaattaaatattgttggaaaagtagagagtaataagataggatgttaaattggaaaaaaaagtagtatgaatttatgtatatattaatattttttatatttttatttttagtttagaatttttttttgaatttgattagttttaatgatattttttaaaaatttattttagtgtttaataagtgttttatatttaataggttttagattaaatttttgatttttttttttaaatttattttttttttaatttttttattttagataatggtaattttatttttttagttgtttagttaaaaatttgggttttttttttttatattttatatttagttagttattttttttaaaattatgattgttttattgtaggtaatgtttttgatttttatgatatgttttttttatagtattgttaatatttgatatattatattatttatttgtttattgtttgttttttttgattagaatgttagttgtatgagggtagattttgtttttttttgttttttgttttatttttagggattagaatagtgtgtggtatagaggaggtatttaacgtatgttgaatgaataagtgattattttattaaaaggaatttgaggttggttgagtgtatgtttagggataggaaataaatgaagtatgggtgttgttgttagagagtaagaatatttttaagaatattttgggggtaatgtttaaagaatagaagaatgaatttgattagtttttaagggataattttaatattaaaaaagagaataaaattagttaatggtgtaagtttattttatgaaaatttatgagtttaatattttaaaagggagaaaaatatagagtttattaaatgttagttgtaatataaaagggatatgtttattattgttgatttatttttatttgttatgtgagaagtaaattattattgatttagtatgtaaggtagtgtgaatagttatatggttatgtttttttttttttttttgagatggagttttattgtgtcgtttaggttggagtgtagtggcgtgatttcggtttattgtaatttttatttttcgagtttaagcgatttttttgttttagttttttaagtagttgggattataggcgtttgttatcgttttcggttaattttttgtatttttagtagagacggggttttattattttggataggttggttttgaatttttgatttcgtgatttatttatttcggttttttaaagtgttgggattataggtgtgagttatcgcgttcggtcgttaggttgttttttttataattatatgtttatttatgagatgtggatgtgtatttttttttgtgttattaggaaagaatatagagattttattttttttattttttaaataaagaaatatattaagaataggaagaattgatatttttgattatataaaatgattagaaagttagtttaaagtatattttaagtaattaaatatttttaaaggatagttagttatatagatttaaatttttattttttagaaaaattaaatttttagatagttttattaattataataaagtagtaagatttaattatattttttattatattaatagattaggttagtatattaaaaagattaggtaagggggtaggtattgataatttaaatattttattttggggaagtacgtggagttttaaaatattaaaatttatttgataggtttaggaattttgtgatataataaggaaagtttttttatataaattagattttagttgggcgcggtagtttatatttgtaattttagtatttagggaggttgaggtgggtagattatttgaggtcggagtttgagattagtttggttaatatggtaaaattttgtttttattaaaaatataaaaattagtcgggagtggtggtgggtgtttgtagttttagttatttgggaggttgaggtaggagaattttttaagtttaggaggtagaggttgtagtgagttaagatcgtattattgtattttagtttgggcgataagagtaaaatttcgttttaaaaataaagtggatttggtttaaatgattattagtttagaattgtgttgattatgaaagtaggtcgtttaattaaattatttgttaattggtttgaatattaagaattagaaattttagtaggtttgaggtttttttgggtttattagtatttgttagttttttttatggttggaaaggtttgaaaagataaaaattattgaaattttaagggaggtaattttggaaaaaatgaatgtagaatagatataaatataaaatataattaataaagaagtttaaattaatggtatttatatttgtgagatgttgttaatttaagtgtattgtttagtgttttt

SEQ ID NO: 41 - DNA, 3647 bp, Artificial Sequence
  chemically treated genomic DNA (Homo sapiens)
tatggtttagtttttagtttagttttgtgattttgggaaagtttttttagttcgtggaattttaaggtttaaggttttttttttgtaaaatggggaatgataatatttgttttttttggagttttggggatttagtgttttgaggaacgtggttgtaggttagagtggtatagagtagggtttaatgaagtatggcgtttatagtagtttttttgattggattaattttttcggatataatagtagggtaggggtggggtttggggagaaaggatatttttaattttgattttaatatttcgatggtttttaaggttgtttgtatatttatttaggtgtaagttttttaaggtgtggtgtgatgaattagtgatttttggagttaggttagcgtatttttttttcgtagggttgtaagttgtaggattgagaggtaggttgattaggttttgggttggatgatggggtgagagtaaggggttagttttgatatatgtttaatttttttttttagttttaagatattttgggtaaattgtttattttagtttttttgatttttattttaattttaatattagtttaagagaaaatagggatattgatggttatttagaagggttgttgtgttttatatatagtaatatttttcgaatgtttgtgatagcggtttaaggaataagttaattttatattattattttggatatttgtataaaattttattttatttttattatatgaatgtgttagggttgtttttttgttttgttttttttttttttttttgagatagagtttcgtttttgttgtttaggttggagtataatggcgcgattttggtttatcgtaattttcgttttttaggtttaagcgatttatttgttttagttttttcgagtagttgggattataggatgcgttattatgttcggttaattttgtgtttttagtagagatagggtttttttatgttggttaggttggtattaaattttcgattttaggtgatttatttgttttggttttttaaagtgttgtaattataggtatgagttatcgtatttagtcgtgttagggtttttttttgtttaatttttttttttttttttagtttttttttgtttgttttaatggagttttattttgttatttaggttggagtgtagtggtaagatttagtttattgtaatttttgttttttgagtttaagtaatttttttgttttagtttttcgagtagttgggattataggtgtttgttattatatttagttaatttttgtatttttagtagagatggggttttgttatgttggttaggttggtttcgaatttttgatttcgtgatttgtttgttttggttttttaaagtgttgggattataggtatgagtcgttatattcggttaatttttgtattatttttttaaagagagttttttaaattatataagttttaggttttataaaatttagatttgttttagtataattaaatttgggattatttattgagtaattattatgtgttaagtattgcgttgagtgtttttagagtattattttttttaattttagtatagtatgttagatgttgttttatagatgagttaattgagattagagatgtttagttatttgtttaaggtgatatgattgatatggaatagagttaagatttttttttttttttttgatacggagttttattttgttttttaggttggagtgtagaggcgtaattttagtttattgtaagttttgttttttaggtttacgtatttttttgttttagttttttgagtagttgggattataggtattcgttattatatttggttaattttttgtatttttagtagagatagggttttatcgtgttagttaggatggtttcgattttttgatttcgtgatttgtttgtttcggttttttaaagtgatggaattataggtgtgagttatcgcgattggttagatttaagatttgaatttaggtttttttggttttagaggtttttgttttttaattttttagtatgtatacgtatttgtttttttagaggtgtttgtttaagtgtgtttagtatatggaagtaagttagaaatgttaggtatatttgtaaagaggtgtgggagatgggggggagggaagagagaaagagatgttggtgttttttattttttagtttttgataggtgtttttgatttttttttgattagtatagttgtatttttggttggggtattttaattagaattgttaaatttagtatataaaaataaggaggtttagttaaatttgaattttagataaataatgaataatttgttagtataaatatgttttatgtaatattttgttgaaattaaaaaaaaaaaaaaaagttttttttttatttttatttttattattaggtttaaggaatagggttaggggttttaaatagaatgtggttgagaagtggaattaagtaggttaatagaaggtaaggggtaaagaagaaattttgaatgtattgggtgttgggtgtttttttaaataagtaagaagggtgtattttgaagaattgagatagaagtttttttgggttgggtgtagttgttcgtggttgtaattttagtattttgggaggttgaggcgggaggattatttgagtttgggagtttaagattagttttattaacgtggagaaattttgtttttattaaaaatataaaaaatttagttggttatggtggtatatgtttgtaattttagttgttcgggaggttgaggtaggagaattatttgaattagggaggtagaggttgtggtgagtagagatcgcgttattgttttttagtttgggtaataagagtaaaagttcgtttaaaaaaaaaaaaaagttttttcgatgtgattgtttttttttaaatttgtagatttttttaagattatgttttttagatattttaaagattttagaagatatgtttcgggggttttggaagttataaggtaaatataatatatttttttttttgattattaattttattagaggatgtggtgggaaaattattatttgatattaaaataataggtttgggatggagtaggatgtaagttttttaggaagttagataattgagatttaaagggtgttaagagtggtagtttagggaaatttatttcggatttcgggggagggggtagagttattagtttttgtatttagggatttttcgaggaaaagtgtgagaacggttgtaggtaatttaggcgtttcggcgttaggagggacgatttaggtttgcgcgaagagagggagaaagtgaagttgggagttgtcgatttttagatttcgttggaatgtagttggagggggcgagttgggagcgcgtttgtttttaattatcggagaaggaggaggtggaggaggagggttgtttgaggaagtataagaatgaagttgtgaagttgagatttttttttattgggatcggagaaattaggggagtttttcgggtagtcgcgcgtttttttttacggggttttttattgcgtcgcgcgttcggtttttatttttcgtagtatttcgcgtttcgcgtttttttagtcgggtttagtcggagttatggggtcggagtcgtagtgagtatt

SEQ ID NO: 42 - DNA, 3647 bp, Artificial Sequence
  chemically treated genomic DNA (Homo sapiens)
ggtgtttattgcggtttcggttttatggtttcggttggattcggttgggagggcgcggggcgcggggtgttgcgaggggtgggggtcgggcgcgcggcgtagtaaagggtttcgtgggaaggggcgcgcggttgttcggggggtttttttggttttttcggttttaatggaggggaattttagttttataattttatttttatatttttttaagtagttttttttttttatttttttttttttcggtgattgggagtaagcgcgtttttagttcgttttttttaattgtattttaacgaagtttgggagtcggtaatttttagttttatttttttttttttttcgcgtaggtttgggtcgttttttttagcgtcgggacgtttgggttgtttgtagtcgtttttatattttttttcggagaatttttaaatgtagaggttggtgattttgttttttttttcggagttcgggataaatttttttaggttgttatttttaatattttttaagttttagttatttaattttttggggagtttgtattttattttattttaagtttattgttttaatattaaataatggtttttttattatattttttagtaaaattgatagttaaggagggggatgtgttgtgtttattttgtggtttttaggattttcggggtatattttttggaatttttgaagtatttgaaaagtatgattttaagagggtttataaatttgggaggagatagttatatcgaaaggatttttttttttttttaaacgaatttttgtttttgttgtttaggttggagagtaatggcgcgatttttgtttattataatttttgtttttttggtttaagtgatttttttgttttagtttttcgagtagttgggattataggtatgtgttattatgattagttgaattttttgtatttttagtaaagatagggtttttttacgttggtgaggttggttttgaatttttaagtttaggtgattttttcgttttagttttttaaagtgttggaattataattacgagtaattgtatttagtttaaaaagatttttattttaattttttaaaatgtattttttttgtttatttaaggaggtatttagtatttaatgtatttaaggttttttttttgttttttgttttttattagtttgtttaattttattttttaattatattttatttggagtttttgattttattttttaggtttagtggtaggggtggggatggaaggaagatttttttttttttttttaattttaataagatattgtatgggatatatttatattaataaattatttattgtttatttgaaatttaaatttaattgggtttttttatttttatgtgttaaatttggtagttttagttggaatgttttagttaagaatgtagttatattggttaagaagggattaaaggtatttattagggattggagaatgaaggatattagtatttttttttttttttttttttttttattttttatatttttttataggtatatttagtatttttaatttgtttttatgtgttgagtatatttaagtaggtatttttagagggataggtgcgtatgtatgttagggagttgagaaataggggtttttgggattaagaggatttgggtttaaattttgaatttggttagtcgcggtggtttatatttgtaattttattattttgggaggtcgaggtaggtagattacgaggttaggagatcgagattattttggttaatacggtgaaattttgtttttgttaaaaatataaaaaattagttaggtgtggtggcgggtgtttgtagttttagttatttaggaggttgaggtaggagaatgcgtgaatttgggaggtagagtttgtagtgagttgagattgcgtttttgtattttagtttgggagatagagtgagatttcgtgttaaaaaaaaaaaaaaaaattttgattttattttatattagttatgttattttgggtaagtgattgagtatttttggttttagttggtttatttgtaaaatagtatttgatatattatgttggggttaaaggagataatgttttggaagtatttagcgtaatatttggtatataataattgtttaataaatggttttagatttagttatattggggtagatttaggttttgtggggtttgaagtttatataatttgggaaattttttttaagaaagtaatataaaagttggtcgagtatggcggtttatgtttgtaattttagtattttgggaggttaagataggtagattacgaggttaggagttcgagattagtttggttaatatgataaaattttatttttattaaaagtataaaaattaattaggtgtggtggtaggtatttgtaattttagttattcgggaggttgaggtaggagaattgtttgaatttagagggtagaggttgtagtgagttgagttttgttattgtattttagtttgggtgatagagtaagattttattgaaataaataaagagaggttaaagagagagaaaggaattgaatagaaaaagattttagtacggttgggtgcggtggtttatgtttgtaattgtagtattttgggaggttaaggtaggtggattatttgaggtcgggagtttggtattagtttgattaatatggagaaattttgtttttattaaaaatataaaattagtcgggtatggtggcgtattttgtaattttagttattcgggaaggttgaggtaggtgaatcgtttgaatttgggaagcggaggttgcggtgagttaagatcgcgttattgtattttagtttgggtaataagagcgaaattttgttttaaaaaaaaaaaaaaaaaataaaataaaaaaataattttagtatatttatatagtaaggataaggtggagttttgtataggtatttagagtgataatgtaaaattaatttattttttggatcgttgttataaatattcgagaaatattgttgtgtatggaatatagtagtttttttggatggttattaatatttttatttttttttgagttggtgttagggttagggtgaggattaggggaattgaggtaagtaatttgtttaggatgttttagggttagagagaaaagttgggtatgtattaaaattgattttttatttttattttattatttagtttaggatttggttaatttgttttttagttttgtagtttatagttttgcgggaagaggatgcgttgatttggttttaggagttattggtttattatattatattttggagggtttgtatttggatgagtgtgtaggtagttttagaggttatcgggatgttaggattagggttagaggtgttttttttttttaggttttatttttgttttgttgttgtgttcggaaaggttagtttagttaggaaagttattgtggacgttatgttttattggattttattttgtgttattttgatttatagttacgttttttagaatattgagtttttaagattttagaggaggtaggtgttattattttttattttgtagaagaggaattttgagttttgagattttacgagttaaaggaatttttttaaggttatagagttgagttgggaattgagttatg

SEQ ID NO: 43 - DNA, 5312 bp, Artificial Sequence
  chemically treated genomic DNA (Homo sapiens)
gtcggtttcgggggtcgacgatttttcgggtaggcgacgtgttttgtttaggttttatttttcgcgttcgtaaaacggggtggataacgtagtttaaggtagagtcgcgttaaggtttttcgttgtcgtcgggttttggcggtttgatcgggtttggggttcgagcgtgttttcgggtttgggggggtcgtcgcgatggattcgttggtagcgttttaggatcgtttggtggagtagttgttgtcgtcgcggatttaggtttagaggcggtttaaggtgcgtgtgtggagagggcggaacgtgggtttgtgatttcgcgggtttcgggattcggtatggggttttcgttttcgcgcgttacggttcgttagcgtttaggtttagttttttttttcgtagcggtttcgtaggttcgcggttttacggtggggcgacgtgttttgtttaggttttattttacgcgattttaaaacgcggcggagaatgcggtcgtgggatttttttaggggttttaagggtttgcgggggttgggcgtttgggcgcgcgggcgggggaggttcggcgtcgcggtttataaataggcgttgtttcgttatcgtcgttgtcgtcgttttcgcggttggattcgggttaggtggggtttttcgttttttggtatttttcggaggggtgagtgtcgaggtttttagttttttcggtttatggagggttttgagtgtgttttaggggttttaattttgttgttttttgttcgaggagggaggatatcgtttgtgtttgttgcggtttgatatttttttacggaataaatatagtgtcggtttttgtagagttttttttgggattggggttaggggtgtttttttttgttattatttcgtttgtttttttatttttaggtttttgtttacgggttttttttttatttttgttaacgaaatgttttattttgggaatcgtattttttgttgtttttttatatcgtatttggtaagagatagggtattgggtttttggagaaatttttgtgtttttattttgttttattttgtttttaggatattgataagtagtacgtgggtttcgttatattgtttaattaggtgtatcgtaagtcggtgaagaaaggttttgattttatatttatggtggttggtgagtgggttaggtttttcgggggagtggttggggttattggttagttaagttttgtcgttggagttttagatttaacgtagttttttttttgtatttgtgtgtaggtgagttaggtttggggaagtttatattggtttatagtttttttttgatagatttgtataaggatcggaagttgtttagtgttgagggtgagtggtttttaggaggttttggtattgatttttagtttttttttatgggatttttttaaggatttttttttaggtttagtttttattgttttgttttcgcggtgtgggttttttgggggtagggttaaggtattaagatggatgaggacgagggttttggttgttaagggtgaggggttgagggttggagaggtttttttagtggtttttttttcgtagagcgtattagttagacggtagagattttaaaatatacggtggatattgaggagaagggagttaagttgaagtttattatcgtggatacgtcgggattcggggacgttgttaataatatcgagtggtgagtgaggtttgttgagaaaggttttgtttaggcggttatagtattcgaggtttggttttattttttttttgtttatagttggaagtttattatcgattatgtggattagtagtttgagtagtattttcgtgatgagagcggttttaatcgaaagaatatttaagataatcgagtgtattgttgtttatattttattttttttttcgggtatgggtgtgtggttgttttggggttaggttcgggagtgtagtttttataatatggttttttggttgtgtttatgtttatttttggttgttttcggtaggttgcggttagtggatgtgggttttatgaaggtattgtatgagaaggttaatatcgtgttttttatcgttaaagttgattgttttgtttttagtgagattcggaagttgaaggagcgggtgagtttgtcgtcgtataggggtttggttagggttttggggttgagagtattagggggatttgtttggttttaaatttgatggtttttgttttattatagattcgggaggagattgataagtttgggatttatgtatattagttttttgagtgtgattcggacgaggatgaggattttaagtagtaggatcgggaattgaaggtgaatatgtagattggtggggtaggggggatggagttggtgaggggtagaattagagggttttgttttttttatattgagtttgttggaggagggttaggttagtttagttgggtgtaagagttatttgttttaggagtagaggatttgtattttttttatttagggttagaaggtaaaggttattatgtttttgtttggttggggtgggttatgtgggtttcgtgtggtgtttggtaggtatggagtatttgtttagatttagaggtgtagtagtgggttaggtttttaattttaattttttttttatgggttattagaggaaggggttgttttagtggtatattttggtttttagatttttgagttttagggttggtggttttgggtgtttcggtagttagagtgatgatggagattatgttaggggtaggtggttattagggtaggggtattagtatggggagatataggtttagttttggggagggaaggggtagttggagggggtggtttttgatgagggaggagatgaggagggagtatgtttggttgggtatagtttggaaaggttttggaatgtgagttatatgggttttggttttagttaggggtagagaggttagaaaggggtaacgttaggatttttttgaggagagatagttgatggtgatgttggaggggtgtttcgggagttatatgttcgttttttattagtaatcgtgtaattacgtttatcgggtgtgagttttttttttttttttttttaggagagcgcgtttttcgtcgttataggtagtaatacggtggtggaggttaaggggtagcgggttcggggtcgattgtatttttgggggatcgtggagggtgagtagagttttggggtattaggtttggtgggggaaggttgttttgggtcggcgttagtttattatttatttttatttcgtagtggagaattaggcgtattgcgatttcgtgaagttgcgtaatatgtttattcgtacgtatatgtacgattttaaggacgtgacgtgcgacgtgtattacgagaattatcgcgcgtattgtatttagtagatgattaggtgcgcgttttagtcgcgagttagatttcgtttttttggtttcgtttacgtttttataattgagggtcggttttgttagtttatttagatttgaattttgtattattttttaagtttttttttttttttagagtttggtttttttagaattaagtttagggttgtgagggtttcggagggtagggttttagtagtggcggggatgggttaggtatcgttagtttacgttgagtttttcggtggcgtcgtttcgtttattttttttttcgtttcgcgtagtaaattgatttaggatagtcgtatggagagttttatttcgattttgtcgttgtttatttcggacgtcgagattgagaagtttattaggatgaaggatgaggaagtatgtggggcggcgggggcggcggaggcgggcgttagggatgttttttcgcggtgttgtttattcgtcgggttgttttcgttcgtagttgaggcgtatgtaggagatgttgtagaggatgaagtagtagatgtaggattagtgacgttcgtcgcggatatatcgttcgttttcgggacgttttcgtatttttggatattagatcggattgttttcgattcggagacgcggggttatagtttttagttgattttaatttatttttagtattatttttttttaggttattgtgtttgttttcgaggggtttggatcgtagttttcgtttagttggttttttttgattttgggggattaggagcgaagttgggcgggattttagagattcgttttttttgtttttttttcgttttcggacggttatagtatttaaatcgtaggttttgttttggtaggtaggtaaagttaggtagaagaggatttttaggattttgggtttgttttttgttttagtgttgtagaacggatttgggagtttttttttgtttgttttcgcgggttatttagcgagtgttgagattttattttttgtcgaggcgggtcgagtttttttttatttttagacgtttagcgggtagggttgggttgaattaaatgggagttttttagatataaggaggttagaggttgtaaggagcggggtcgtgatcgtttatattttttttttatagttcggttcgatttggagggttttcggggtattgggcggtgagttattttttggtaattttcggtgtcgttttttgttttcgttcgaggttttttttttttagtatcgttgtggtgtgtcgggattttgagtttaggtttttcgatgtttttattcgtatgattttttttcgttatacgatgtttcgttttttttcgttgtgaatgtcgcgttttgttttggtgataggagaataatgttggtgaacgtcgtagcgggtgttcgagtgtttcgtgtgtttttgagagcgggtgggagcggaagtttgagcggtttgcggttttcggcgatagtgtgttatttgtcgttgtagcgcgcgttcgcgcggtttttgggttatttttggttaggtcgtagtattgtggtcggtgcgggcgtggtaggggcggggcggttttatcgttcggttttttcgtttacgtttttcgttgtagagtaagtcgggttgtcgttttttcgttatgggtttcggtgagtttggagttcggtcgggttttcggttgttttttaggtcgattcgggttgagaggagttttggtcgtttggttgtagttgggagagatttgggttagatttagaggggatttttagtcggcgtgcggggtggttagggtggagaggttggcgggttatcgggacgtcgggtattaggggttggatggagtcgggtcggtagtttgggtatttagagatgtcgtttaggtgttcgtcgatcgttcggtttattgcggcgttttttttgtagg

SEQ ID NO: 44 - DNA, 5312 bp, Artificial Sequence
  chemically treated genomic DNA (Homo sapiens)
tttgtaagggaagcgtcgtagtaagtcgagcggtcggcgggtatttgggcgatatttttgagtatttagattgtcggttcggttttatttagtttttgatgttcggcgtttcggtagttcgttagtttttttattttgattatttcgtacgtcggttggaagttttttttaagtttgatttaagttttttttagttgtagttaaacgattagagttttttttaattcgggtcggtttagggagtagtcgggggttcgatcggattttagatttatcggagtttatggcgagaagacggtagttcggtttattttgtagcgggaggcgtaggcgggagagtcgagcgataaggtcgtttcgtttttgttacgttcgtatcgattatagtgttgcggtttggttagaaatagtttagaggtcgcgcggacgcgcgttgtagcggtagatagtatattatcgtcggaggtcgtaggtcgtttaggttttcgtttttattcgtttttaggggtatacggagtattcggatattcgttgcgacgtttattaatattgtttttttgttattaggataggacgcggtatttataacggaagaaaacggagtatcgtgtggcgggaagggattatgcgggtgggaatatcgggaggtttaggtttaggatttcggtatattatagcggtgttggggagaagaggtttcgagcgagggtaggggacggtatcgagagttgttaggaggtggtttatcgtttagtgtttcgggggttttttaggtcgggtcgggttgtggagaaggggtgtaagcggttacgatttcgttttttgtagtttttggtttttttatgtttggagggtttttatttgatttagtttaattttgttcgttaggcgtttggggataagggaagattcggttcgtttcgatagaaaatggggttttagtattcgttgggtgattcgcgggagtaggtaaaggagggtttttaagttcgttttgtagtattggggtagggaatagatttaggattttgggaatttttttttgtttagttttgtttgtttgttagagtagggtttgcggtttgggtgttgtgatcgttcgggggcgggggaagggtaagggaggcggatttttgaagtttcgtttaatttcgtttttgattttttaaggttagagagggttagttgggcgggggttacggtttaggtttttcggaaatagatataatgatttgggagggggtggtgttgagaataaattagggttagttgggggttgtggtttcgcgttttcgggtcgggaatagttcggtttggtgtttaggggtgcgagggcgtttcggagacggacggtgtgttcgcggcgagcgttattggttttgtatttgttgttttattttttgtagtattttttgtatgcgttttagttgcgggcggagataattcggcgggtgagtagtatcgcggaggagtatttttgacgttcgttttcgtcgttttcgtcgttttatatatttttttattttttattttgataagttttttagtttcggcgttcggggtgggtagcggtaggatcgggatggggttttttatgcggttgttttgggttagtttgttgcgcggggcgggggggaggatgggcggggcggcgttatcgggaggtttagcgtgggttggcgatgtttggtttattttcgttattgttgaggttttgtttttcggagtttttatagttttggatttggttttagggagattaggttttgggggagggggggggtttagggaatggtgtaaagtttaagtttgggtgggttgataggatcggtttttagttatggagacgtgggcggggttagaggggcgaggtttggttcgcggttggggcgcgtatttggttatttgttggatgtagtgcgcgcggtagttttcgtagtgtacgtcgtacgttacgtttttgaggtcgtgtatatgcgtgcggatgagtatgttgcgtagttttacgaagtcgtaatgcgtttggttttttattgcggggtgggggtgggtagtgggttggcgtcggtttaggatagtttttttttattagatttggtattttaagattttatttattttttacgattttttaggggtatagtcggtttcggattcgttgttttttggtttttattatcgtgttgttgtttataacggcgaagggcgcgtttttttgggggaaggagggagaaaggtttatattcggtgagcgtaattgtacggttattgatgggaaacgggtatgtaattttcggggtatttttttagtattattattaattatttttttttaaagagattttggcgttgtttttttttggtttttttgtttttggttggagttagagtttatgtggtttatattttagggtttttttaggttatgtttaattaggtatgttttttttttatttttttttttattaagaattattttttttagttgttttttttttttttagggttgagtttatgtttttttatgttgatgtttttgttttggtggttatttgtttttggtatggtttttattattattttagttgtcggggtatttaaagttattaattttggagtttagaaatttgggagttagggtgtgttattggggtagtttttttttttggtgatttatgggaagagggttggggttgggggtttggtttattgttgtatttttggatttgggtaagtgttttatatttgttaagtattatacggggtttatatgatttattttagttaggtaaagatatggtgatttttattttttagttttggatgaagggggtataggttttttatttttagaataaatgatttttgtatttaattgggttgatttggtttttttttagtaggtttaatgtgaaggagataaagttttttggttttgttttttattagttttattttttttgttttattagtttgtatgtttatttttagttttcggttttgttgtttgaagtttttattttcgttcgagttatatttagggaattggtatatatggattttaaatttgttaattttttttcggatttgtggtggggtaaggattattagatttgaggttagataagtttttttggtatttttagttttagggttttggttaggtttttgtgcgacggtaggtttattcgtttttttagttttcggattttattggggataagatagttagttttggcgatgagaggtacgatgttgatttttttatgtaatgtttttatgaaatttatatttattggtcgtagtttgtcgagagtagttaagggtgggtataggtatagttagggggttatattgtaggggttgtattttcgagtttggttttaggatagttatatatttatgttcgaagggggagatgaagtataggtagtagtgtattcggttgttttggatgttttttcggttgaggtcgtttttattacggaagtattgtttaaattgttggtttatatagtcggtgatgggtttttagttgtgggtaggagggaggtgaggttaggtttcgagtgttgtggtcgtttaggtaaggttttttttagtaggttttatttattattcggtgttgttgatagcgttttcgaatttcggcgtgtttacgatggtgagttttagtttgatttttttttttttaatgtttatcgtgtgttttagaatttttatcgtttggttgatgcgttttacggggaaggggttattggaagggtttttttaatttttagttttttatttttggtagttaggattttcgtttttatttattttggtgttttggttttatttttaggggatttatatcgcgagaatagaatagtgggagttggatttgaaagggagtttttggagaggttttatggaaggggattggggattagtgttagggttttttgggggttatttatttttagtattgagtagttttcggtttttgtataagtttgttaggaagaggttgtggattagtgtggatttttttaggtttgatttatttgtatataggtatagagaaggagttgcgttaggtttggggttttaacgatagagtttggttggttagtgattttagttattttttcgaggagtttggtttatttattagttattatgagtgtgaagttaaagtttttttttatcgatttgcggtgtatttggttgggtagtgtggcgaagtttacgtattgtttgttaatgttttggggataggatggaatagggtagggatataaaggtttttttagaagtttaatattttgttttttattaaatgcggtatgaggagatagtagagggtacggtttttagggtggggtatttcgttggtaaaaataaggggagggttcgtgggtaaaagtttggagataagaaggtaggcgaggtggtggtaggagaaggtatttttggttttaattttagggagggttttgtagggatcgatattgtatttatttcgtggggagatgttaggtcgtagtaggtataggcgatgtttttttttttcgggtagagggtagtaggattgggatttttgggatatatttaaggttttttataagtcggagaagttgggggtttcgatatttattttttcggagagtgttagggggcgggaggttttatttggttcggatttagtcgcgggggcggcggtagcggcggtggcggagtagcgtttatttatagatcgcggcgtcgagtttttttcgttcgcgcgtttaggcgtttagttttcgtagatttttggggtttttggaggggttttacggtcgtatttttcgtcgcgttttggagtcgcgtgaggtgaggtttggatagggtacgtcgttttatcgtggggtcgcggatttgcgaggtcgttgcggagggaagggttgagtttaggcgttggcgggtcgtggcgcgcggggacggggattttatgtcgagtttcggagttcgcggggttatagatttacgtttcgttttttttatatacgtattttgagtcgtttttgggtttgggttcgcggcgatagtagttgttttattaggcggttttggggcgttgttagcgagtttatcgcggcgatttttttaggttcgggggtacgttcggattttaggttcggttaggtcgttagagttcggcgatagcgagggattttggcgcggttttgttttaggttgcgttgtttatttcgttttgcggacgcgggaagtgaggtttggatagggtacgtcgtttattcgggggatcgtcgattttcgaggtcgat

SEQ ID NO: 45 - DNA, 4858 bp, Artificial Sequence
  chemically treated genomic DNA (Homo sapiens)
ggaatttttttttttttttttttttttgaaatagggtttcgttttgttatttaggttaaagtgtagtgtcgcgattttagtttattataatttttgttttttaggtttaagggatttttttattttagttttttaagtagttgggattataggtatgtgttattatattcggttaatttttgttttttttatagagatagggttttattatgttgtataagtcggttttgaatttttgagtttaagtgagttatttgttttggttttttaaagtgttgggattatatatgtgaattatcgtattcggttttaaaaatgtttttttaagcgtaattacgtaatgttagttgtagtttagatttttggatgttaatttaaaatagttttataggaatttagtgtggtggtttacgtttgtaattttagtttgaggtaggtggattatttgaggttaggagttcgagattagttgggttaatatggtgaaattttgtttttattaaaaatataaaaaaattagttgggtatagtggtaggtattcgtaattttagtttttcgggacgttgaggtagaagaattgtttgaatttaggaggtagtggttgtagtgagtttagatcgtgttattgtattttagtttgggtaataagagtaaaattttgttttaaaaaaattaattaatttaggttgggcgtagtggtttatgtttgtaaattttagtattttgagaggttgaagcgggtggattatgaggttaagagatcgagattattttggttaatacggtgaaattttatttttattaaaaatataaaaaaaaaattttaaaaaataaaaaaataaaaataaataaataaattaaaaaaatataataattagttaggcgtagtggtaggcgtttgtaattttagttagtcgggaggttgaggtaggaggagaatggagtgaatttaggaggtagagtttgtagtgagttgagatcgcgttatagtattttagtttgggtaatagagcgagattttattttaggaaaaaaaaaattaattaattaaaaaaatagtaagataaataatattttttttattttagtaaaaggatgaagttagttttttaatgaataaaaataagagattgttgaatgttaagttttatagatagtttagataatatagggagatattatttttatatatatatatatatatatatatatatatatatatatatatatatatatatatataaaatagttgcgtatggtggtatgggtttgtagttttagttattggggtagggttagggggtgggaggttgaggggagaggatgttttaatagggaggttgaggttgtagagagttatgattacgttattgtattttagtttgggtgatatagtaagattttgttttagaaaaaaaaaaaagaaaaaagttaagaatgtatttttgaggaattttattaataaaatgtattaaatatagttaaagagttttttgttatatgttaagtggaaagttatgaagaaagagaagaatagaagtaggaggatattggtttttattttttatttttttaagaagtaagatttattattttttaaaaagtttaaatattggtaaggtaagatataatttttatttataatattgtatttttgtttttaggtaataaattaaatgttagataaaagtataatatttattatttaatttttaggttttagtatagaatttataaatattttgttggttaaggtaaaaaggtgtattgtatttttagagagtttgtagagttttgagtattaattttataatttttatattttaatttatataaagtattattaggttaagaaatagattatatagtaggtataatatttttgggtatgtaaatatgttaaggattaaagtaagaaaagagtaattataggggttatattatatttgttaaaaagtgatttgtttaaaaattaaaaagaagtcgggtgtagtggtttatatttgtaattttagtattttgagaggttggggtgggtggattatttgaggttagtagtttaaaattagtttggttaatatagtgaaattttatttttattaaaaatataaaattaggcgtggtggtaggcgtttgtaattttagttattagggatgttgaggtaggagaatcgtttgaattcggaaggtagaggttgtagtgagttaaaatcgtattattgtattttagtttgggtaataagagtaaaattttgttttaaaaaaaaaaaaataaaaataaaaataaaaaagaaatttagtttatttttttgtgtaatttttaataaattgttgagaagtgattttatataggaattttgtataatttattttgatgcgttcgaggtggtcgttagttgatttcgcggagtttatttttttggttttttcgttttaacgtcgttcgttttttagttaggatgtttgttcgtggttcggttatcggtatcgatttgggtattatttattcgtgcgtcggggttttttaatatggtaaggtggagattatcgttaacgattagggtaatcgtattatttttagttacgtggtttttacggatatcgagcgttttatcggcgacgtcgttaagaattaggtggttatgaattttattaatattattttcgacgttaagaggttgattggacggaaattcgaggatgttatagtgtagtcggatatgaaatattggtcgtttcgggtggtgagcgagggaggtaagtttaaagtgtaagtagagtataagggggagattaagattttttttttagaggagatattttttatggtttttacgaagatgaaggagatcgcggaagtttatttggggggtaaggtgtatagcgcggttataacggtttcggtttattttaacgattcgtagcgttaggttattaaggacgtaggtattattacggggtttaatgtgttgcgtattattaacgagtttacggcggcggttatcgtttacggtttggataagaagggttgcgcgggcggcgagaagaacgtgtttatttttgatttgggcggtggtattttcgacgtgtttattttgattatcgaggatggtattttcgaggtgaagtttacggtcggcgatatttatttgggcggtgaggatttcgataatcgtatggtgagttatttggcggaggagtttaagcgtaagtataagaaggatattgggtttaataagcgcgtcgtgaggcggtcgcgtatcgtttgcgagcgcgttaagcgtattttgagttcgtttacgtaggcgagtatcgagatcgattcgttttacgagggcgtggatttttatacgtttattacgcgcgttcgtttcgaggagtttaatgtcgatttttttcgcgggattttggagtcggtggagaaggcgttgcgcgacgttaagttggataagggttagatttaggagatcgtgttggtgggcggttttattcgtatttttaagatttagaagttgttgtaggatttttttaacggtaaggagttgaataagagtattaatttcgacgaggcggtggtttatggcgtcgcggtgtaggcggttatttttatcggcgataaattagagaatgtgtaggatttgttgttattcgacgtgatttcgttgtcgttgggtatcgagatagttggcggtgttatgattttatttattaagaggaatattacgatttttattaagtagacgtagatttttattatttattcggataattagagtagcgtattggtgtaggtatacgagggcgaacgggttatgattaaggataataatttgttgggtaagttcgatttgatcgggattttttttgcgtttcgcggggttttttaaatcgaggttattttcgatattgacgttaatggtatttttaacgttatcgtcgtcgataagagtatcggtaaggaaaataaaattattattattaatgataaaggtcgtttgagtaaggacgatattgatcggatggtgtaggaggcggagcggtataaatcggaagatgaggcgaatcgcgatcgagtcgcggttaaaaacgttttggagttttatatttataatattaagtagacggtggaagacgagaaattgaggggtaagattagcgagtaggataaaaataagattttcgataagtgttaggaggtgattaattggttcgatcgaaattagatggtagagaaagatgagtatgaatataagtagaaagagttcgaaagagtttgtaattttattattagtaaattttattaaggtggttttggcggcggtagcggcggcggcggtttaggagttttcgggggatttattatcgaagaagtggattaagtttgtatttaagttagcgtaaatttttttgtttttttttttttttttttttttttgtttgtttttttgaaatgtttttgtgttaagtacgagatttattgttggaagtttttggtatatgtaaatgaaaggagaggtgtaataatttagtttaattataaaagttttaaagtttgttttttaaaaatattattcgaggtttttttttaatgtattttgcgtgtttgttgatttgagtatttttgattagttcgtgtatggagatttgtttgagatgagaaattttaagtttgtatatttgttttgtagaagtttggaaatagtaaaatatataggagtttaaattgtttatttttatgtattattttaaaattaaattgaatattgtagtaatgttaaggataggtatattttttgtaaataaatgtataaaatgtaaatgtaaagtaaagttgaaattgattttaaaaaaaaaaaa

SEQ ID NO: 46 - DNA, 4858 bp, Artificial Sequence
  chemically treated genomic DNA (Homo sapiens)
ttttttttttttgagattaattttagttttattttatatttgtattttatgtatttgtttgtaaaaagtatatttgtttttaatattattgtaatgtttagtttagttttaaagtagtatataaaaataaataatttaagtttttatatattttattgtttttaagtttttatagaataggtgtgtaaatttaaggttttttattttaaataaatttttatgtacgaattaattaaaaatgtttaagttagtaaatacgtaaaatgtattaaagagaaatttcgaataatgtttttaaaaaataaattttggaatttttataattaaattaagttgttgtatttttttttttatttgtatatattaaagatttttaataatagatttcgtatttggtataaggatattttaaagaaataaataaaaaaaaagagagagagagaaaggtaaagaggtttacgttgatttgagtgtaagtttagtttattttttcgatggtgggtttttcggaggtttttgaatcgtcgtcgtcgttgtcgtcgttaggattattttggtaaagtttgttgatgatggggttgtaaattttttcgagttttttttgtttgtgtttatatttatttttttttgttatttggtttcggtcgagttagttgattattttttgatatttgtcgaggattttgtttttgttttgttcgttaattttgttttttagtttttcgttttttatcgtttgtttgatgttgtaggtataggattttagggcgtttttggtcgcgattcggtcgcgattcgttttatttttcgatttgtatcgtttcgttttttgtattattcggttaatgtcgtttttgtttagacgatttttgttattggtgatggtgattttgttttttttatcggtgtttttgtcggcggcggtaacgttaaggatgttattggcgttaatgtcgaaggtaatttcgatttgggggatttcgcgaggcgtagggggaatttcggttaggtcgaatttgtttagtaggttattgtttttggttatggttcgttcgttttcgtatatttgtattagtacgttgttttggttgttcgagtaggtggtgaaggtttgcgtttgtttggtggggatcgtggtgttttttttgatgagtggggttatgatatcgttagttgtttcgatgtttagcgataacggggttacgtcgagtagtagtaggttttgtatattttttgatttgtcgtcgatgaggatggtcgtttgtatcgcggcgttataggttatcgtttcgtcggggttgatgtttttgtttagttttttgtcgttgaagaaattttgtagtagtttttggattttggggatacgagtggagtcgtttattagtacgattttttggatttggtttttgtttagtttggcgtcgcgtagcgttttttttatcggttttagggtttcgcgaaagaggtcggtattgagtttttcgaagcgggcgcgcgtgatggacgtatagaagtttacgttttcgtagagcgagtcgatttcgatgttcgtttgcgtggacgagtttagggtgcgtttggcgcgttcgtaagcggtgcgcgatcgttttacggcgcgtttgttgggtttaatgttttttttgtgtttgcgtttgaattttttcgttaggtggtttattatgcggttgtcgaagtttttatcgtttaggtgggtgtcgtcggtcgtggattttatttcgaagatgttattttcgatggttaggatggatacgtcgaaagtgttatcgtttaggttaaagatgagtacgtttttttcgtcgttcgcgtagttttttttgtttaggtcgtaggcgatggtcgtcgtcgtgggttcgttgatgatgcgtagtatattgagtttcgtgatggtgtttgcgtttttggtggtttggcgttgcgagtcgttgaaataggtcgggatcgttatgatcgcgttgtgtattttgttttttaggtaggttttcgcgattttttttattttcgtgaggattatggaggatattttttttgggaagaaggttttggttttttttttgtattttatttgtattttgggtttgtttttttcgtttattattcggaacggttagtgttttatattcgattgtattgtggtattttcgaattttcgtttaattagttttttggcgtcgaagatggtgttggtggggtttatggttatttggtttttggcggcgtcgtcgatgaggcgttcggtgttcgtgaaggttacgtagttgggggtggtgcgattgttttggtcgttggcgatgatttttattttgttatgttggaagatttcgacgtacgaataggtggtgtttaggtcgatgtcgatagtcgggttacgggtagatattttgattgaaaggcgagcgacgttaggacgggaaaattagggagatgaatttcgcggagttaattaacggttatttcgaacgtattagaataaattatataagatttttatgtaagattattttttagtaatttattaggaattgtataaggaggtaaattggattttttttttgtttttatttttatttttttttttttgagatagagttttgtttttgttgtttaggttggagtgtagtggtgcgattttggtttattgtaatttttgtttttcgggtttaagcgatttttttgttttagtatttttagtagttgggattataggcgtttgttattacgtttaattttgtatttttagtagagatggggttttattatgttggttaggttggttttgaattattgattttaggtgatttatttattttagttttttaaagtgttgggattataggtgtgagttattgtattcggtttttttttaatttttaaataagttattttttggtaaatatagtatggtttttatagttattttttttttattttgatttttaatatgtttgtatatttaagagtgttgtgtttgttatataatttgttttttagtttgatggtgttttgtgtagattgagatatgaggattatgggattagtgtttagaattttgtaagttttttggaaatatagtatatttttttgttttagttagtagaatgtttgtgagttttgtgttgaagtttgggggttgagtggtagatattgtgtttttatttgatatttgatttgttgtttgaggatagagatgtagtgttatgggtgggagttgtgttttgttttattagtgtttagattttttaaaagataatggattttattttttgaaagaataggagatgaaaattaatgtttttttgtttttgtttttttttttttttatagttttttatttggtatatagtagaaaattttttggttatatttggtgtattttgttggtggaattttttaagaatgtatttttgattttttttttttttttttttttgagatagagttttgttgtattatttaggttggagtatagtgacgtgattatggttttttgtagttttaatttttttgttaaggtattttttttttttagttttttattttttggttttgttttaatagttgggattataggtttatgttattatacgtagttattttgtgtgtgtgtgtgtgtgtgtgtgtgtgtgtgtgtgtgtgtgtgtgtgtgtgtgtgtagagatggtgtttttttgtgttgtttggattgtttataaaatttgatatttaatagttttttgtttttatttattgagaaattggttttatttttttattgaaatgggagaagtgttatttattttattgtttttttaattaattaatttttttttttttgagatggagtttcgttttgttgtttaggttggagtgttgtggcgcgattttagtttattgtaagttttgttttttgggtttattttattttttttttgttttagtttttcgattagttgggattataagcgtttgttattacgtttggttagttgttgtgtttttttggtttgtttgtttgtttttgtttttttgttttttggggttttttttttgtatttttagtagaaatggggttttatcgtgttagttaggatggtttcgattttttgattttatgatttattcgttttagttttttaaagtgttgggatttataggtatgagttattgcgtttagtttaaattaattgatttttttgagatagagttttgtttttgttgtttaggttggagtgtaatggtacgatttgggtttattgtaattattgttttttgggtttaagtaatttttttgttttagcgtttcgagaagttgaaattacgggtgtttgttattatgtttagttaatttttttgtgtttttagtagagatagggttttattatgttggtttagttggtttcgaatttttgattttagatgatttatttgttttaggttgggattataggcgtgagttattatattgggtttttatgggattattttaagttaatatttaggaatttaaattataattagtattacgtagttacgtttaagaaagtatttttggggtcgggtacggtggtttatatgtgtaattttagtattttgggaggttaaagtaggtagtttatttgagtttaggagtttaagatcgatttgtgtaatatggtgaaattttgtttttatgaaaaaagtaaaaattagtcggatatggtggtatatgtttgtggttttaattgtttgggaggttgaggtgggaggattttttgaatttgggaggtagaggttgtaatgagttgagatcgcggtattatattttagtttgggtgatagagcgagattttgttttaaaaaaaaaaaaaaaaaaaagaatttt

SEQ ID NO: 47 - DNA, 7040 bp, Artificial Sequence
  chemically treated genomic DNA (Homo sapiens)
atatagtttggtttgagggaagatgttagtatgtgattataaattggataaaattatttaagatagtcgtattttaattagattaaattttaaaattttaaatatttataagtattttatgtttttaaaaatatgagaaatttgtaagatattattaaatttaaaggtttttaaaattagtttgaaatatatttgtatgttttaaaattttttgtgaagtttagttgtatttagataagtaaaattttatttacgtatttttagagttaaaatataaaatttaagcgattagggtaaagtggaagtaattaattttaattttttcgtatggaaatagatagtgtgcgttggttatatttagggacgtgttttatgtaatttataaattaagatttgtttcgattatattatatggattatataaaaattaaagtagttgtatatgtattttattgatatagaaataagtttatgttatattgttaagtataaaatttaaattttagaatgttaatagtataattttattgaagtaaaaaaaaattgatatgttttttaagtttgagtttataatttttgtatgggaatttttagtaaagcgtatatatttatttatagtttaattttttagttttaaaaaaggtaaaagtgaaatttcgataatgaaatttacggttgtaattagtaatattatatttgtacggttgtaatattcgcgtttttcgtattgtaatttttggaatttattgtaatttttcgaattcgttgttattcgagattttttaatttggcggttttttgttaggattcgggcggtcgttaagagtgcgtaggcgtaagcgcggtcgtcgtcggtggggttttatgtgttgttgagattgttgttgagtttttgggtttttttaagattgttttttaaaagacgacgtgatgattttaaagagaaaggaaaatttgttgcgtacgtagaagggtaggttgggcgtattttgagcgtttttcggggatcgacggtttcgtttacgtgttttcgggtattagcgcgtttaaagttcgtgtattaggaaacgtataaaagtattagcgggcgagttcgagggcgagtttacgggtagttaggaggcggcgagggcggtttgttttttagagattggggaattaagaaaggtagagttattttttcggttttagcgtagtaagtgtaggaggtagggagggcgtagcgtttcgtcgtttacggtattcgtggaattcggtgcgcgtttcgggagttggggcggtttaggtttagcgtgtttagaaagttaattacgttggttaggaggacgtttttttattattcgcgatttttaggttttgattaaagttaaattaaaaggagttattcgtttcggtatttgttgttatttttgtgataaatatggtgtttgatacgaaagtattttaatagttatgttgttaattaaagaataaaatacgtaaagtttgtgcgttaagaatacgagagtatttcgttttttaggaggtgtagtttattttgttttttttgttttatatataattttaaggagaattttttgttattaatatattttgttttttgtttttgggggatgatataggtatattgtatttgattagattagtgttaattttttatttacgtttttattatatgttgtattattaatatagtaggattttatatttttaatcgtaaaatttaagagtagaaaaatatttaaattgtatgttagtttaatatgaaaacgagttattttagttttgataggatatttttaaattaatattatttaataaatatgttttttattcgtataagtttatatatatggttttttaaatgagttttataaataataattagtattgaggttttgatttaagtatttgaaattttgttattttttataataattttgagatgggtatattttttttattttgtagataaggaaataggtattgggatggtaagaaatttaggttatttggtttttaatagttttttattattatgttaaagttttatttatttttgagatttaaaatattatatagtgtatatatatttggtaattaaattaggattaaatattaaagttaagggttaagtatagtgttttgtaattttagtattttgggaagttgaggcgggtagatcgtttgattttaggagtttaagattagtttggaaaatatggtgaaattttattttaataaaaaaatataaaaatagttgggtgtggtggtgtgtgtttgtggttttagttatttgggaggttgaggtgggaggatcgtttgagttaaggaggtagaggttgtagtgaattaagattatattattgtattttagtttgggtgatatagtgagacgttgttttaaaaagaaaaaagtaaaattaaagtaagaatataataagaaatatgtttggtattgtgttacggggagaaaaaattaatagggagataaattttgtttttagggtaagtgtaatttgttgagtaaaagaaatattttaagatattttaaaaaagaaaataaaggttgttgtaaattggatatttaattaaatatttttgggtagattggtagatgatagatttaatgaatttggggtttataaatatatagaatgttatatttttattaatattttatgttttgggtaaagagtaaaattaattttgaaaatgaattgtgtatgtaattattttaaaaataaagattatataataagttatattattttgtattatgtgtaatatttagggggttaaggtatttttattttgttaatatttatagtatttttattatataattattttagagttttgaattataattttaattaggtgatagttattgagtaaattttgtaatgtaaatttattatagaatataattgtattattttttttttatttattggtatttttttatatttggggtttgatataattgtatataataatttttttattaaaatattttatagagttggttaggtatggtggtttacgtttgtaattttagtattttgggaggttgaggtaggtggattatttggggttaggagtttgagattagtttggttaatatggtgaaattttatttttattaaaaatataaaagttagttgggtatggtggtatgcgtttgtaattttagttattcgggaggttgaggcgggagaatcgtttgaatttaggtggcggaggttgtagtgagcggagatcgtgttattgtattttagtttgggtaataagagcgaaattttgttttaaaaaaaaaaaaaagattgaggtttaagtaggttaaatattatatatatattagattatatattaagttatataggttgtatagaatagaaattttattttagggttttatagattttaaattgtttttgtaaatggtttatgtttattaatttatttttttaaagttaatatattttaaaaatagaattgttattattaaaatgtggttatatataatttaatatataagtgttttagaagaagggaattttattatttgattttttaaaatatagattttaatatttttgtgtgtgtgtgtttttttatgaatatggtaatattattggttttttttttaaagatatggtatgaaattaattttttgtttagagttaggattttgttttattatttagtttggtgtgtagtggtacgattatagtttattatagttttaaattttttagtttaagttttttttcgttttagtttttaaagtagttaggattataggagtgtattattatatttagttaattttattattattttttgtagaggtaggttttaaatttttggttttaagtggtttttttattttagttttttaaagtattggtattataggtataatttattgtatttggtagaaaattaatttttattataaaaattagaaagaaagattttattgtttgatggttaatattttgaattttattttaatttttggttttttatattatatgtaggtattagtgattttgtgttatttttatttttttagatttttttttttttataatttttttatatgtgttattatttgaagttttgattatagttttgaattatttttatttttttgttttttttaattttggtttaaaatttcggtaatttatttgttacgaagtttagaattttttttgtaagtgagttgatcggttgggttaaatcgttttggaagggaaggattgttaggaagttagtatgttgttaagatgttttgttaatttgttgtgtaagttgtatagagtgttaggggatttttttttttattgatgaatttaggtgtgtgttatgatttgtattagtgattttatttggattgattaaggttgtaattttttatttatatgaatgttgtatttagtttttttttgtaattggttaaataaatgtttgttgtttgtattttaatttttagttaatatttgttggaagtgatttaatgtagttggagaatgatattaataattattatagtttgtaaagtgtgaaataattttattgtgttttgtggtttttttagtttgaggattgataatgtgtagcggatgagatttgaaaaaaacgtattttattataatttaagaaataatgtaaaagaggggtgagttttgaggtagttttatgttgtttgtttggtatgagtttgtttttataagaatttattttaagtgtggaagggaaatgtttttatttgaaagggatagttgtgttttatttcggtttttttttttatttgataaaaatttttgttgagtgatagtatagatgtagtttatttggaataagtgaaggaaaaggagaaaagggatgaggtggagcgaaggagtagttagttatgtttttaaagtttcgcggttttttttagtttttttatttaatttagcggttttggtgtttttttgtaaagtgagatgttttcgtttttggttttacgtttttattttcggagcgagttttttttatcggtggacgcgcggttttgtagtagttttttagagttatttgcgaagttgtttttgggggttatttttttcgggtttcgcggttgtcgcgtcggttggtttggtgttttattgattgggagtaggtgtgtttgttgtagaggttgggagttggagggtttggttcggtgtataaggcgatttatcgcggtgtttttgtggttataaagtaagtgaataagtgtattaagaatcgattagtatttcggcggagtttttgggttgagtttaacgtagtaaggttgcgttacgataatatcgtgcgcgtggtggttgttagtacgcgtacgttcgtagggtttaatagtttagggattattattatggagttcggtggtaacgttattttatattaagttatttatggcgtcgtcggttattttgagggggacgtaggggagttttattgtcgtattggaggatagttaagtttgggaaagtgttttaagtatttattagatgttgtgaacggtttgttttttttttattcgtaaagtattgtgtatttggatttgaagttcgcgaatattttgattagtgagtaggatgtttgtaaaattagtgatttcggttgttttgagaagttggaagatttgttgtgtttttagatatttttttattttttaggaggtatatatatttatcgcgtttcggagtttttgaaaggagagggcgtgacgtttaaagtcgatatttatttttttgttattattttttggtaaatgattattaagtaggcgtcgtattcgggggagcggtagtatatattgtacgcggtggtggtttacgatttgcgttcgttttttttcgttgtcgttttcgaggattcgtttttcgggtagcgttttggggacgttatttagcgttgttggagatttagcgcggcgtagaggtcgagcgcgcggttgtttttggtggattttatttttttgaaagttgaattcggttgattgaaaatttggttaagataagtttttgtttgattttatttgtttttaaaggaagtggagatgtcgaagaaaatatatttgtaggatggagttttagaaaataaagttattaaaaatttttttagtttttagtgttttttttaggatatattagtaaagttataagtttagtatttgttgttttagtattgttagtaattaattttatttatatagttatgtgttttgttttttattgttagtattttatttatttaaatttgttattgataaaagtttgtttaaaatagaattttattgtagaaatgttaaaattttttataaatttatatatattttatatttattatataaattttaattattaatggtgtagttgtttttatattaaattagtaaaaatttttaaaaaaataagtaatgtttttttattattttttttagtaaaattttttgtttgtaatgatttttatttataaaagttatatattgaggtatatttatatttaaaggaattatattataaatgatttattgtaatatttttaatttgtgtattgtaatgagtagaaatattttgttaaaatatttttaaattgggttatttttatttggtattgggatttagaagtagaagataaagattatatgatgtgagaggaaaatgtaggagtagaaggtaaagattatatgatgttaggaattatgaaatttaatatttggatggaagagaatagataaatagaattagattgtttattttagatattaaaataatggatgttggtatataggatttaaaggagaaggtgattggattttgttattgggatagttttgatttttttttagtaatagtagtttttgtgtatggtggaaagtaaggttgatgtaatggttggtagagggaatggtaaggttttgaagtagaggttgtgtatgtattgttaaggagggagaggtaggaagtttaaaagggggttagagatatagaaatgtt

SEQ ID NO: 48 - DNA, 7040 bp, Artificial Sequence
  chemically treated genomic DNA (Homo sapiens)
aatatttttgtgtttttgatttttttttaagttttttgtttttttttttttaatagtgtatgtatagtttttgttttagggttttgttattttttttgttagttattgtattagttttgttttttattatgtatagaaattgttattgttaaaagaaagttaaagttgttttaatgataaaatttaattatttttttttttaaattttatgtattaatatttattgttttgatgtttagagtgggtaatttagttttatttgtttgtttttttttatttaaatgttaaattttatgatttttgatattatataatttttattttttatttttatattttttttttatattatataatttttattttttatttttgagttttaatattaggtaaaaatgatttagtttagaagtgttttagtaaaatgtttttatttattgtaatgtataagttaaagatattataataagttatttatgatataatttttttgaatgtaaatgtattttagtgtatgatttttatgagtgaaggttattataaataagaagttttattggggggagtagtaggaaagtattatttatttttttaaaagtttttattgatttggtgtgggagtaattatattattaatagttggaatttatgtggtaggtatgggatatatatggatttatagaaaattttgatatttttgtagtggagttttattttggataaatttttattaataataaatttaaataaatgaaatattagtaatggaaagtaaagtatatgattatatgaataagattagttattaatagtattgagataataggtattagatttgtagttttgttaatgtgttttagaaaaagtattggagattaaaggagtttttagtaattttattttttaaaattttattttataaatatgtttttttcgatatttttattttttttaaaaataaatagaattagataaaaatttattttgattaggtttttagttagtcgagtttagtttttaaagaggtgagatttattaaaagtagtcgcgcgttcggtttttgcgtcgcgttgggtttttagtagcgttggatgacgtttttaaggcgttgttcggggagcgagttttcgaaaacggtagcggagagggacgggcgtaggtcgtaggttattatcgcgtatagtatgtgttgtcgttttttcgaatacggcgtttgtttggtagttatttgttagagagtgatggtaaaggaataaatgtcggttttaggcgttacgttttttttttttaggagtttcggggcgcggtgggtgtatgtgttttttagagggtaagagggtgtttggaagtatagtagattttttaattttttagagtaatcgaagttattaattttatagatattttgtttattgattaagatgttcgcgggttttaggtttaagtgtataatgttttgcgagtggaggaagagtaggtcgtttataatatttagtgagtatttgagatatttttttaaatttaattgttttttagtgcggtagtgaggtttttttgcgttttttttagggtggtcggcggcgttatagatgatttggtgtaaagtgacgttgttatcgaattttatgatgatggtttttaggttattggattttgcgggcgtgcgcgtgttggtagttattacgcgtacgatgttatcgtggcgtagttttgttacgttgagtttagtttagaaatttcgtcgagatgttagtcggtttttggtgtatttgtttatttgttttatggttataggaatatcgcggtaagtcgttttgtatatcgagttaaattttttagtttttagtttttgtagtaagtatatttgtttttagttaatggagtattaggttagtcggcgcggtagtcgcggggttcgaggaagatggtttttagaagtagtttcgtaggtagttttgagggattgttgtagggtcgcgcgtttatcgatggggaaaattcgtttcggaggtaggggcgtagggttaggggcgagggtattttattttgtagggggatattagggtcgttggattgaatgaagagattaggggaaatcgcgggattttggaaatatgattgattattttttcgttttattttatttttttttttttttttttttatttgttttaaatgagttatatttgtgttgttatttagtaagagtttttattagatggagggagaaatcggaatgaagtatagttattttttttagatgaaagtattttttttttatatttgaagtgaatttttataaaaataagtttatgttagataaatagtatggagttgttttagaatttattttttttttatattattttttaaattataataaaatacgttttttttaagttttattcgttgtatattattagtttttagattaaagagattataaagtataatgaaattgttttatattttgtaggttgtaatgattgttagtgttattttttagttgtattaaattatttttagtaggtattggttaagagttaaaatgtaaatagtagatatttgtttaattaattatagggaaaaattaggtgtaatatttatatggataaaaaattgtaattttaattaatttaaatagaattattgatataggttataatatatatttaaatttattagtggaaaggagaattttttgatattttatgtagtttatatagtaaattagtaagatattttagtaatatattgattttttaataattttttttttttaaggcgatttggtttaatcggttagtttatttgtaagagagattttagatttcgtagtaaatgagttatcgaagttttgaattagagttgggggagataaaagaatagaaatgatttagagttgtgattagggttttaaataataatatatatgggagaattgtagaagaggaaaaatttgaagaaataaaaatggtataaaattattggtatttatatataatgtagaaaattagaagttggaatgaaatttagggtattggttattagataataagatttttttttttgatttttataatgaaaattaattttttattaagtgtagtgagttatgtttataatattagtgttttgggaggttaaggtggaagggttatttgaggttaagaatttgagatttgtttttataaaaaataataataaagttagttgagtgtggtggtgtatttttatagttttagttattttggaggttggggcgggaggagatttgaattgaggagtttgaggttatagtgagttatgatcgtgttattgtatattaggttggatgatggagtaagattttgattttaagtaaaaaattaattttatattatatttttggaaaaaggattaataatattattatatttatgagaaaatatatatatataaaagtgttaggatttatattttaaaaaattaaatggtaaagttttttttttttaaagtatttatgtgttaggttatgtgtaattatattttaatgatagtagttttgtttttgaagtatattgattttgagaaggtaaattaataaatatgaattatttatagaaataatttgaggtttgtgaagttttggaataggatttttattttatataatttgtgtggtttagtatgtgatttagtgtgtgtataatatttaatttgtttgagttttaattttttttttttttttgagatagagtttcgtttttgttgtttaggttggagtgtaatggtacgattttcgtttattgtaattttcgttatttgggtttaagcgattttttcgttttagtttttcgagtagttgggattataggcgtatgttattatgtttagttaatttttgtatttttagtagagatggggttttattatgttggttaggttggttttaaatttttgattttaggtgatttatttgttttagttttttaaagtgttaggattataggcgtgagttattatgtttggttaattttatggaatattttagtagaaagattgttgtgtgtaattgtgttaaattttaaatataaaaggatgttaatgaatagagaaaaagtaatataattatattttataataaatttatattgtaaaatttatttagtaattgttatttagttaggattataatttagggttttgaaatggttatataataggagtgttgtgaatattagtagaatgagagtgttttaattttttagatattatatataatgtaagataatgtgatttattatataatttttatttttaagataattgtatatataatttatttttaaagttggttttattttttatttaaaatataaggtattagtgaaaatgtggtattttgtgtatttataaattttaagtttattagatttattatttgttaatttgtttaagaatatttaattgaatatttaatttataatagtttttgtttttttttttaaggtattttaaaatattttttttatttagtaaattgtatttattttgaaagtaggatttatttttttattgatttttttttttcgtaatatagtgttaaatatattttttattatgtttttattttaattttgtttttttttttttgagatagcgttttattatgttatttaggttggagtgtagtggtgtgattttggtttattgtaatttttgtttttttggtttaagcgatttttttattttagttttttaagtagttgggattataggtatatattattatatttaattatttttgtatttttttgttgagatggggttttattatgttttttaggttggttttgaatttttgaggttaagcgatttgttcgttttagttttttaaaatgttaggattatagggtattgtgtttggtttttaattttaatgtttaattttgatttggttattaaatatgtgtgtattatgtaatattttggattttaaaaatgggtaaagttttagtatggtggtaaaaggttattaggggttagatggtttgggttttttattattttagtgtttgtttttttatttgtaaaatgaggaaaatatgtttattttaggattgttgtgaagagtaatagagttttaaatatttagattagggttttaatgttaattattatttataaaatttatttaaaaaattatgtgtatgggtttatacgaataagaaatatatttgttaggtagtattggtttaaaagtattttattagggttgaaataattcgtttttatgttaaattaatatataatttgagtatttttttgtttttgaattttgcggttaaaggtataaaattttgttgtattaatggtatagtatgtagtaaaaacgtgggtggaaggttaatattaatttgattaaatgtaatatgtttatgttattttttaaaggtaaagagtaaaatgtgttgataataaggaattttttttggaattatatatgaaataaaggagataagataaattgtattttttgaggagcgaaatgttttcgtgtttttagcgtataggttttacgtgttttgttttttgattggtagtatgattattaagatattttcgtattaaatattatatttattataagagtaataatagatatcggaacggatagttttttttaatttgattttaattagagtttgaggatcgcggatagtgggagaacgtttttttgattaacgtggttggttttttgggtacgttgggtttgagtcgttttagttttcggggcgcgtatcgggttttacgggtatcgtggacggcggggcgttgcgttttttttgttttttgtatttgttgcgttggggtcgaggaggtggttttgttttttttgattttttagtttttggaagataagtcgttttcgtcgttttttggttattcgtgggttcgttttcgggttcgttcgttggtgtttttgtgcgttttttagtgtacgggttttgggcgcgttggtgttcggaagtacgtgggcgaggtcgtcggttttcgaaagacgtttagagtgcgtttagtttgtttttttgcgtacgtaataaatttttttttttttttagagttattacgtcgttttttggaaggtagttttaaaaaggtttagaagtttaatagtagttttaatagtatataaaattttatcgacggcggtcgcgtttgcgtttgcgtatttttgacggtcgttcgagttttggtaggggatcgttaggttaagagatttcgggtgatagcggattcgagaggttatagtggattttagaggttatagtgcgaagagcgcgagtattgtaatcgtgtaagtgtggtattgttggttataatcgtggattttattgtcgaaattttatttttgttttttttaagattaaaaagttaagttgtagatgaatatatacgttttattaaaaatttttatataaagattatagatttaaatttgaaaaatatattaatttttttttattttagtgggattatattattgatattttaaaatttgaattttatatttagtaatataatatagatttgtttttatgttagtaaagtatatatatagttattttaatttttatatggtttatataatatggtcggggtagattttagtttgtggattgtatggagtacgtttttggatgtgattagcgtatattatttgtttttatgcggggaggttggggttggttgtttttattttgttttgatcgtttgggttttgtattttgattttggagatacgtaaataaaattttatttgtttaaatatagttaaattttataaaaggttttaagatatataaatgtgttttaaattggttttggaaatttttgaatttaatgatattttgtaagttttttatgtttttaagaatataaaatgtttatagatatttgaaattttgaaatttgatttgattaaaatgcggttgttttgaatgattttgtttaatttatgattatatattggtatttttttttaagttagattatgt

SEQ ID NO: 49 - DNA, 6246 bp, Artificial Sequence
  chemically treated genomic DNA (Homo sapiens)
ttttgtatatttgtattttatataataatattttgtgtaatttttttttaaatgtagaatattgatattggagaatgttttttatatattttaagtgaaaaaggagtaaaaattatataatgtattattttatttttttaataaaatgtaaatgtgtatagtaaagatatagaggtgttatagtgttagggaaaaggggtgtaagattagtgtttgttttttattttttgttttgtttataaattttttatattaaaaatataaattttaaatgaaaataatggaataaatataaatttttattttataattaattaaaatgatagtaattgaattttttaaagttttaaatttattaaaatgggagaaatggatgatagtattagcgtttgaaaggtggaaagtggagggacggtgggtagattatttggttgatttaagaaaattgaattttaggttagttgagatttatgttgatttatagaattttaagaatgtttaggaattgggagaagattaaggatattagaagagaagggggtgaaaataaggaaagttgttgaaatttagtttaagaaatagttagatatttatttttgtttattaaagtcgagtgatttttttgtagtagggtttttttcggataggatatttggattaagaaatattagatatagtagagggcggtcgaaatatgttgaaattaggaatagttaatagatgttgaggtttttattttagttttttttttatttttgttgttggaatgttggagatagggagaattttttttgcgcgagttgatttgtttgttaaaaaaacgataaagaaattgttataggaggttttttaagtgaaaatagttagttatttgttttataggaaatagtttttttttatataattatttttagagatttttgttttaatatgtgtaggtaatttaggattatttaacgtgtaaggaaagtttataagatggaaaaaaaattttttttgaggtagggtttggttttgttatttaggttggagtgaagtggtgtgattataatttattgtagtttcgatttttgagtttaagtgatgtttttatatagttttttaagtagttgggattataggtatgtataattatgtttggttaagttttttttatgttttgtagaagtaaagtttttttatgttttttaggttggtgttaaatttttgggtttaagcgatcggttttttaaagtgttggaattataggggtgagttatcgcgtttagtttaaaataattttttaaagaaaatttgtagaaaataaagattatgtatgaaaaaggaaatttagaagatattaatgaaataagaatatagtgttgttagcgtgtatgtgtatatgcgtatatatatataaagaattaaatatttttaggaagataaagttatgagaatattttagagaagagaaattttttaaatggaaaatagaataaaaagaaaattaaaggataagtttaagaggtatatagttaaaaaaaatggtagttttaataagagagaataaagaagaaaagttataaaatgttttaatttaagtgtgaatataaaaatatattatttttatagtaagtgagaaaaatagggtgtaaaaggtgtatatgatgttattttatatgtagggataagggaaaataagattatatatttatagttgtttgtatttatataaattaataggatattaaaaaaaaaaaaaaataatatttaagaaaaatagttatttgtgagggaaggtggagattttattgaattttttatatatatagttgatttttgaatagtaggttttgaattgtatagatttatttatttacggatttttttttgtttttgttatttttgagatgataagatcgattttttttttttttttttttcggtttgtttaacgtgaagatagtgacgttgaagatttttgtgatgttttatttttatttaatgaataggaaatatatttttttttttttttttgtgatttttttaataatttttttttttttttttttttttttttaagacggagttttatattgtcgtttaggtttaagtgtagtggcgcgatttcggtttattgtaagtttcgtttttcgggtttacgttatttttttgttttagttttttgggtagttgggattataggcgtttattattacgttcggttaatttttttgtatttttagtagagacggggttttatcgtgttagttaggatggttttaattttttgatttcgtgattcgtttatttcggttttttaaagtgttgggattataggcgtgagttatcgcgttcggtttataaataatttttaaaagatagtaagggatatagtagggtagtaagtgttttatttataagaggagtagtaatgttagaggtttatagagtacggatttttagcgttgtcgttttatataattagtttttttgatttttaaaattatttgtattcgtaatttttttaaaaataaaaatttaaaaaattaaatttttttatttataaaaataatttttttaggttttattttttttgattgggtattatgtttttgttaacggagatttagagtttagagaaattcgaaaaagtaattttagtttttttaggatgagttggtcgggaggaagggaggttttaattttagcgtttcggggttagagtaaagcgaagaggttttttatggttataagcgggcggtttacgtagcgtattgtaggtaggtgcgagttatatgcgttaagtgttcggagcggttttttggtagttagtgttaattaaaattattcgtacgggagtggattttcgttgataatttagaaataagtaatagattttttgatgtagttatttgtgtcgcgttttttcgtatcgttcgttacgttttggtttttggagattattttttagggtaggggttgtcgttcggtcgggttcgcggggtttttcggtttgatatggtcggtgttggagcggtacgtgcgcgtttcggtttttcggtcgttttcgtttttcgtcggtgcgtatcggcgttcggggagtcgttggttcgggtgtttagtcggtttttgttttgtttggcgttcggatcgttatttttgtcgttttttcgttagttttcgtagtttttagattggtcggtttgcgcgtttatttttgtttttcggatcggttatcgtcggaggtcgcggaggagggttcggtcgcgtagatttcgtttatcgggtttatttttcgttatataaggttatttttttattttcgcgggttatcgtcgtcgtaatcgtcgcgttagcgtttttttttacgcgcgggggcgtttttgtttatcgttttcggtagggtttttggtggttatgggggataaggggcgttgatttattcgggcggggtttcgggagttgtatagattaaggtagtttttcgtttttttttttattacggagattttgtgggagatgtcgtgggttttttattatagattaggaaataggttcgtagaggggttatacggttaagtagcggtattttaggtattgggggttttcgaggggaaggggtagatttttgggagttagagttagtagttgggttgggaagtttcgagtgtggatagagagggtgggaatgacgttttttgtgggaagagagggtgggtaagtttgggatgtttttgagcgggaatttagtatgttttgtgaggagggttataagtatatttttgtgaggaggttgagttttatcgaggataggacggagggagtttgagtaggtagagagggggtttggggaggcgttggttcggggaggaagtgggtaggggagaaattttgatattaatatttaataggtaaatgtcgtggtttttgttgtgggggtttttggaggatttttaggaaaacgagggaagagtaggaaaaggcgatatggttgtaggggttaagtttaggagtcgttttttatagtatttattttgtagaagggaaatttgaggtttttagacggtaggggttgattttgtagagattggtgagtaaaggggattattttaagttttagtggtattaggaatatttataatttttgatttggattaaggttgttagtttggtttagttaagagttttttagaaggatggtttatatattttaaattaaaggggttagatacgtgtatattatttttagttattttggaagttgaggtggggggatcgtttgagtttgggagttggaggttagtttaggtaggtaatatagtgagattttatttttaaaaaaataaaataaaataaaataaaaaaatattaaaaaagtttttagaaagatttttgaatttttttggattttttagtggagatttggaaatttgaattttgataattttttttatagtggggttaaggaggaattaggtaagttaaaagaagtgaattttatttttttattgtttgtttgaattttgtatttaagtaagtgttatttaagtaatttaagagattggtttatcgaaaaaataaaattttttaaatttttatagttggtagattgtggttatagttatagtgtattaagattatttgtttagtatttttggtgatttaaaagggtttgaggataggagtttagagttgggttagttgtttaggtatttagggttgttataggtaaaattgttggaatttagggtagtattgtaaatgttacgtcgtttttagggttttttgtttgtcgttggaattaaatttatttagattttggaaattttgttttggattttttttaataagtttatgagaaattaaatttttttttttatgcgatattggattttttataaagtaaaattaagatgagtaaagatgtggtttttagatagtgtttgaaaaagtagagattatggtgttaggcgttattatttgggtttataaaagttgttataagacgttaaggttataagttatttagtttatgtattcgttttttaatttttttttgttggtattgggttttatggcgtttttgttgattacggttattgtttttatttgttttggcggttttgtttttttaggttttgtgtttttttttatagtttttagggagtttattgaggagttggttaatattatttagaattagaaggtgagtgtcggttagttagggttttagttatgagggttttagggtgggtgatttttaagatgaggttatgagtaggttgggtttggttttaagatgtttgtaggttaggaaaaatttttatggattaaggttcggtttagttatgagggagagaggagttgggttggggggtttagtattgtggatggatttatggaggtgtttggtagattttttagggattatttgtttttttggtttggttttgtttgttattgttagtttttatttagttatttttgaatagaggatagtagagaagggttagtatttttttagaattatgtggtatttgttaattggattttgattataataatgtagttattttttttagtattattataggttcgtttttataggaggattttttagtagagttcgttttttgttttattagtaatagtttatatgtttgagtattgtttatattaggtttggtgtacgtgttttatgtgttattttattattgttagttattttaagaggtaggtacgatgaatttattttgttaaggtttagtgaggttaagtgatagaggttggatttaagttaggtttggttaatattagagtgtttatgtttttaattgtagtgtttttttattattagaaggtagggtatttaatatattagatttttatcgttttttatttgatttgttttggttaatagtggtttaggttatttttattttattcgtttttattttggtttttttcgtaggtttttgtttttttgttttgattatggtaagttttgtatgtagtttgttttttattagtggtgttaattttttttttttagttttaagattttaaatagtgggattttatttttatgtttgttgtttaaagtagaaaacgaagtttaggaatgttgaggggttgttaggtttgtttttgtgttatattagggatgtttgtggggtttgtgttggggtagatttggtttgggttgttagggtaggtttataatttttgttagtattttgtttattgttattttgtttttatagg

SEQ ID NO: 50 - DNA, 6246 bp, Artificial Sequence
  chemically treated genomic DNA (Homo sapiens)
tttgtgggagtaaagtgatagtgagtagagtgttggtaggggttgtgggtttgttttggtagtttaggttaggtttgttttagtataggttttataagtatttttggtgtggtatagaggtaggtttggtagttttttagtatttttgagtttcgttttttgttttgaatagtaggtataggggtgaggttttattgtttagggttttggagttgagagaaaaaaattgatattattagtaagggataagttgtatgtaaggtttgttatagttagggtaggaggataggggtttgcgggaagggttagggtggggacgagtgaagtaggagtggtttgggttattgttgattaagataaattagatgggaggcggtggggatttggtgtattaaatgttttgttttttgatggtgagggaatattgtagttaggagtatggatattttggtgttggttaggtttggtttgaatttagtttttgttatttaattttattgaattttagtagaatgggtttatcgtatttgttttttgaggtggttggtagtgatgaaatgatatataaagtacgtgtattaggtttggtgtaagtagtgtttagatatgtgagttgttattagtggggtaaggagcggattttattaaggaatttttttgtaagggcgggtttatgatggtgttggggagaatggttgtattgttatggttaaaatttagttggtaaatgttatatggttttgggagggtgttggtttttttttgttgttttttgtttaggaatggttgagtaggagttggtagtggtagataaggttaggttaggagagtaggtagtttttggggagtttgttagatatttttataggtttatttatagtgttgagttttttagtttagttttttttttttttatggttgggtcgggttttggtttatggagattttttttgatttataggtattttaggattaggtttagtttgtttatgattttattttgggaattatttattttggagtttttatagttaggattttggttagtcgatatttattttttggttttgggtgatgttgattagttttttaatgagttttttgagggttgtagagggaggtatagggtttggggaggtaaagtcgttaaggtaagtgagagtaatgatcgtggttaataaaagcgttatgaggtttagtgttaataggagaggattgaggagcggatgtataggttgggtggtttgtggttttggcgttttgtggtagtttttataggtttaagtggtgacgtttgatattatggtttttgtttttttaggtattatttagaaattatatttttatttattttgattttattttgtggaaaatttagtgtcgtataaaggaaagagtttgattttttatggatttattgagaagggtttagggtagagtttttaagatttgggtgggtttaattttagcggtaggtaaggggttttgagagcggcgtggtatttgtaatgttgttttgagttttagtagttttgtttgtgataattttgagtatttggatagttgatttaattttgagtttttgtttttagatttttttgggttattagaagtgttgagtagatagttttagtgtattgtggttgtgattatagtttattagttatgggaatttggggagttttattttttcgatgaattagttttttaaattatttaagtaatatttgtttggatataaaatttaaataggtaatagaagagtaaagtttattttttttggtttgtttaatttttttttggttttattgtgagagggattgttaaagtttagatttttaggtttttattgagagatttagaaagatttagaggtttttttgggagtttttttggtgtttttttgttttgttttgttttgtttttttggagatggggttttattatgttgtttgtttaggttggtttttaatttttagatttaagcgatttttttattttagtttttagagtggttggaagtagtgtgtacgtgtttggtttttttaatttaaagtgtatgggttatttttttgggaaatttttaattgggttaggttggtagttttagtttaggttagagattgtaagtgtttttagtgttattggggtttggggtgattttttttgtttattagtttttgtaggattaatttttgtcgtttgggggttttaaattttttttttgtagaatgagtgttgtggagggcggtttttgggtttggtttttgtagttatgtcgtttttttttgtttttttttcgtttttttagaagttttttagaaatttttatagtagaggttacggtatttgtttgttgggtgttgatgttaagattttttttttatttatttttttttcgaattagcgtttttttaggttttttttttgtttgtttaggtttttttcgttttgttttcgatggggtttaatttttttataagggtgtgtttgtgattttttttataaggtatgttggattttcgtttagaggtattttaggtttgtttattttttttttttatagggaacgttatttttattttttttgtttatattcgaagttttttagtttagttgttggttttgatttttagaagtttgtttttttttttcgagggtttttagtgtttggagtgtcgttatttggtcgtgtgatttttttacgggtttgttttttaatttgtagtagagggtttacggtattttttatagggttttcgtgatgggggaaggagcggggaattattttggtttgtgtaattttcggagtttcgttcgggtgagttaacgttttttattttttatggttattaaaagttttgtcgggagcggtgggtaggggcgttttcgcgcgtgggagaaggcgttggcgcggcggttgcggcggcgatggttcgcggagataggggggtggttttatgtaacgggagatgggttcgataagcgggatttgcgcggtcgggttttttttcgcggttttcggcggtggtcggttcgggaggtaggggtgggcgcgtagatcggttagtttggaagttgcggaggttggcgagggggcggtaaaggtggcggttcgagcgttaggtagggtaagggtcggttggatattcgggttagcggtttttcgagcgtcggtgcgtatcggcgaggggcgggagcggtcgaggggtcgaggcgcgtacgtgtcgttttagtatcggttatgttaggtcgagggatttcgcgggttcggtcgagcggtagtttttgttttggagggtggtttttagggattaaggcgtggcgggcggtgcggagaggcgcggtatagatggttatattagagggtttgttgtttgtttttagattgttagcggggatttattttcgtgcgggtaattttaattaatattaattattaaagggtcgtttcgggtatttggcgtatgtggttcgtatttgtttgtaatgcgttgcgtgggtcgttcgtttatggttatggggagttttttcgttttgttttggtttcgaagcgttgggattgggatttttttttttttcgattagtttattttgggaaagttggggttgttttttcgggtttttttggattttgggttttcgttggtaaagatatgatgtttagttaggaggagtaaggtttgagagagttgtttttgtaagtgaaaggatttaattttttagatttttatttttaggaaagttacgaatgtagataattttaaaaattaagaaggttgattatgtaaaacggtagcgttgggaattcgtgttttatgggtttttggtattgttgttttttttgtgagtgaggtatttattgttttgttgtgttttttattgttttttaaaggttgtttataggtcgggcgcggtggtttacgtttgtaattttagtattttgggaggtcgagatgggcggattacgaggttaggagattgagattattttggttaatacggtgaaatttcgtttttattaaaaatataaaaaaattagtcgggcgtggtggtgggcgtttgtagttttagttatttaggaggttgaggtaggagaatggcgtgaattcgggaggcggagtttgtagtgagtcgaaatcgcgttattgtatttaagtttgggcgatagtgtgagatttcgttttaaaaaaaaaaaaaaaaaaaaaaaaaggttgttaagaaaattataaggaaggaggaaaaaatatattttttatttattaagtggaggtggaatattataaaggtttttagcgttattgtttttacgttgagtaggtcgaggaggaagaagaggaggggtcggttttgttattttaggggtggtagaggtaggagagaattcgtggataagtggatttgtgtagtttagaatttgttgtttaagggttaattgtgtatgtaaaaaatttagtggaatttttatttttttttataagtaattattttttttaggtgttgtttttttttttttttggtattttattagtttatgtaaatataagtaattgtgaatatatggttttatttttttttgtttttatatgtgaagtggtattatatatattttttgtattttgttttttttatttattataaaaataatatatttttgtatttatatttagattgggatattttatgattttttttttttgtttttttttattggaattgttattttttttgattatatattttttggatttgttttttaattttttttttattttattttttatttaaaaaattttttttttttgggatatttttatagttttatttttttgagggtatttgattttttgtgtgtgtgtgcgtatgtgtatatgtacgttaatagtattatgtttttgttttattgatattttttaagtttttttttttatatataatttttattttttgtaagttttttttaaaaaattgttttgaattgggcgcggtggtttatttttgtaattttagtattttggggggtcgatcgtttgagtttaggagtttgatattagtttgggaaatatagggagattttatttttataaaatataaaaaaaatttagttaggtatggttgtgtatatttgtgattttagttatttgggaggttgtgtgggagtattatttgagtttaggagtcgaagttgtagtgagttgtgattatattattttattttagtttgggtgatagagttagattttgttttaaaaaaaattttttttttattttataggttttttttgtacgttaggtaattttggattgtttgtatatgttaaaatagggatttttgagggtaattgtgtgggagggggttgttttttatagggtaggtggttgattgtttttatttggggaattttttgtggtagtttttttgtcgtttttttggtaggtaggttagttcgcgtagaaaagattttttttgtttttagtattttagtagtaagggtggagagagggttggggtgggggttttagtatttgttgattgtttttgattttagtatatttcgatcgttttttattgtgtttagtgttttttggtttagatattttattcggagaaaattttgttgtaggagagttattcgattttgatgaataaaaatggatatttaattgttttttaaattgagttttaataattttttttatttttattttttttttttttgatgtttttggtttttttttagtttttgagtatttttgggattttgtaaattaatataggttttagttggtttaggatttagtttttttgggttagttaagtagtttgtttatcgtttttttattttttattttttaaacgttggtgttgttatttattttttttattttggtgggtttaaaattttagaaaatttagttattgttattttagttggttataaagtgggagtttgtgtttattttattgtttttatttggaatttatatttttaatgtagagaatttataaataagataagaaataagaggtaaatattagttttgtattttttttttttggtattataatatttttgtatttttgttatgtatatttatattttgttagaaaaatgagataatatattatatagtttttattttttttttatttaaaatatatgaagagtattttttaatgttagtattttgtatttaaaaaaagattatataaaatgttattgtgtaaagtatagatatgtaaaa

SEQ ID NO: 51 - DNA, 4501 bp, Artificial Sequence
  chemically treated genomic DNA (Homo sapiens)
aagttgttttaggtgtagaaattataaagtaagtaggagtaggtttttgtttttaagatgttttatatgtagtatagatttaacgtatttaaaacggaaggttgttattttttttgtttttttaatttatataataatatatattcgtgttttatgttttaattatattgaattgtttgttttttttattttcgtttgttaatagtgagtagtttggtgtttttagattataggggtgggagggaaagagagagatagtagataattaggttggggtagatagatattagattttgatgttaggtggaggaatttagatgtattggttgttgttttaagttatttttttttggtttaaattttagattggtcgtatagtttaatttttttttttttattaaaggttatttgtgtagaagatgatataaagggggatttagtacggtgattcgtgtttgtaatttttgtattttcggaggttaaggagggaggattatttgagtttaggagttcgaggttgtagcgagttatgatcgagttattgtattttagttttgacgttgagtgagattttgttttttaataaaatatatttaaaatttaaaaagaagattatataaaggggttatttattattttggttagtaatgtagggtaaaatttgaaataatttggttttgtagtattttttagatgttaaatttttattttttattgtatagtttttatagtgttttgtgtgagatgagagggagtatggcgggttttagttggttttgttttgggaaaaattttttatttttgtatcgtttttttaaagcgggggttaagttagcgtcgtttgtttttttatttagattagattttttttttagatgtttttatttttttgaagttttataataattttgtgaggtaagtattattatttttttattttatagatgaaattgaagtttaggaaggttacgtttcgggttttaaatttcggaattttcgtttcgatgttatttaggtttgggttattgagtttaagaaacgggtcgacgggtgattagacggacgtcgggattagtttaagtttagggttgagggtcgttaggtggcgcgtttttttttttttatttttcgcggcggttcgggcgtatttgaatttagcggggtgcgtcggggaaagtaggcgcgtagggtggggcggggagtagttttaattttttagttcggagtgggtaaggagtacggtttagtttagtcggttggtatcgttaagcggtcgtcgggtcgtattagttttttttttgtttgcgttttttagcgtgtaatttatttggggggttatcggggattgaacggagcgggcgagcgttgttaggaggtggggtcggttttatttgtcgattgttcgtagtaggtagggagagggcggggtttgttttatagggttcgttttttagtttttgggtttcgggcgcgcgacgagatataaggtagttaggaaataatgcgtttgtagttcgcgttttcgcgtcgatttcgagagcgttcgggtcgtcgtgcgcgagcgagggagggcgcgcgcgcggggggggcgcgtttgtgagtgcgggtcgcgttttcggcggcgcgtatgtgcgtgtgtgttggttgtcgggttgtttcgagtcggcggggagtcggttcgttttaggtggcgggcggttggagcgaggtgaggttgcgggtggttagggtacgggcgcgggtttcgcggtgcgggttggttgtaggttgttttttgggtacggcgcgttttcgttcggtttcgtcgggttttgggagttgcgtttcgggcggcgttggtaaagtttgttttgaattcgttgtttatagtcgggttcgcgcgttgcgattggttttttttattattttgattcggggttcggtttttcgggacgcgaggattgggcgtaggttgtaagttggtggggttggggaggaacgagagttcggtagtcgattgtgtcgagggattcggggatatttttttcgttcggtcggtattcggttagtacgtttttttttttttttcgtagggagcggatatggattacgattcgtattagtattatttttacgattatgattgcggggaggatttttatcgttttacggcgtttagcgaggatatttggaagaaattcgagttggtgttatcgttttttacgtcgtcgttttggggtttgggtttcggcgtaggggattcggttttcgggattggtttttcggagtcgtggttcggagggtgtatcggagacgaagcggaatttcggggttattcgaaaggttggggtaggaattacgtttttattatacgtcgtgattgtatgtggagcggtttttcggttcgggaacggttggagagagttgtgagcgatcggttcgtttttggcgcgtttcgggggaattcgtttaaggcgttcgtcgtttcggattgtatttttagtttcgaagtcggtaattcggcgttcgtcgttttttgttcgttgggcgaatttaagatttaggtttgtttcgggttcgagagtttaagcgattcgggtaaggattttttcgagttatttaagagggggttattttatgggtggttaaagttttgtttttgtttgaggttaggtattggttttttttaagtttttgggttattttcgtttttttttggttgaagttgttcgtgtagtttttaatcgtgtttgtttggtacgtgggtgtgttggtaaatagtttggaaaagtggcgtgggagttagtttttttttgatgattattggagttttaggggataagggatttgaggtgagggttggcgtttagagaggataatattggggttggattgtaagggattgaagggggtattttaagagatattttaaatttgaagtttttttgttgttgtttttttttttaggaaatttatatttttttagggggagaagaagtcgagagttttttgtgtaaagttaaaattttcgtttttttaaaaatttaggtttttagttggttttattttaaaatgttaataataaatgtttttttttcgtgtttttttattattatttattattcgtgtatttttgagatagggagggaagaatgaatattttttattaatagatggaaaaattgaggtttagagatagataattattataagttagttttagttttttgttatttagttagttttttttttttaatgttttattttaattaggtattttttttttgatgtttggggtttttgtggtagtttattttagaagtattatattttgttttgttgtttgttttgagatggaaaagtgttttttttgtttttttttaatagatttttagcgttagttgttttttggtatttaataaatatttattggtttttattttgtggtaatttgtgggttatatgttggggttaaggtagtagaattttaggttttttttttttatttttgatgtaagtgtaatttcgttgagggtagattggggtattttgtgttattaaattatattgtttttattttggtattttagatttttatattcgtgagaaattttggagagggtatttttgtagagtgtagattgtggttagtgataaataaattaggattaagaaagtttattgtagtttttaggaataatttttatacgattatttgatagggaattggggaatggggtatggaagtttttttatatttgagagaaaaaataggataataaaaattaaaagtttttttttttttggtttattgtgttaaggttatttttaattagtttgttttttatattaagagtttatgtttgtttaatggttggaaagagaattttgagattaaaaaattaataaagatgtatttttataacggttggtggagtggtagagtggaaagagtattgttttggaagttggatattttagtttgagatttagaacgttataaaggtgatatgtggatttcgttgatttgggttttagtttttttatttgtatacgatggggttggatttgattgttttgttgatgatatttttttgtttggatagagtaagatattattttttgaaagggagaatggtgttttaaattattttttttttagatagaatttttttgagttacgaggtttaatattgaaaattaaaggtttgggatgtagggaagtttgttgaattattttttaatttattttttaatttgaatttgtttgtgagtttttagtttatttataggttatatggtttggaataaaatgtaatagattgtaaataatgaggcggggggtggggaaagtgattggtagtagagtttatttaataggggttaggggttgggtaagatagaagtttaaatatagcgtaattagttaattatgggttttggggttaggagggttgaatggttaggtttattaatggagaaataatgcgattgtttatataatggaagtttttttgataaa

SEQ ID NO: 52 - DNA, 4501 bp, Artificial Sequence
  chemically treated genomic DNA (Homo sapiens)
tttgttaggaaggtttttattgtgtggataatcgtattatttttttattaataaatttgattatttagtttttttggttttaaagtttatgattggttgattacgttgtgtttggatttttgttttatttagtttttagtttttattgggtgagttttgttgttaattattttttttatttttcgttttattgtttgtaatttgttgtattttgttttaggttatgtggtttgtgagtgaattagaagtttataaataggtttaggttaaagggtaggttagaaaatgatttagtaggtttttttatattttaaatttttaatttttagtgttaagtttcgtggtttaggaagattttatttaagaaagaaataatttaagatattatttttttttttagagagtagtgttttattttatttagataaggaaatgttattagtaggataattaagtttaattttatcgtgtgtaaatggggaaattgaggtttagattagcgaagtttatatattatttttgtaacgttttggattttaaattaaaatgtttaatttttaaagtaatgttttttttattttattattttattagtcgttgtagagatatatttttattggttttttgattttaagattttttttttagttattaaataaatataaatttttggtgtagaaagtaagttggttaaaaatgattttaatatagtggattaggaaaaaaaagatttttaatttttgttattttatttttttttttaagtgtaggaaaatttttatattttattttttagttttttattaaatggtcgtgtaaaagttatttttaaaagttatagtgagtttttttggttttaatttatttgttattagttatagtttatattttataaaaatattttttttaggattttttacgggtgtggaggtttaagatgttagaataagaataatgtagtttagtggtataggatgttttagtttgtttttagcgaggttgtatttgtattaaggatgggagaggagggtttggagttttattgttttgattttagtatgtagtttatagattgttataaagtaggggttagtgaatatttgttgaatgttagggagtagttgacgttggagatttattgagggggagtaagaaggatatttttttattttaggataaatagtaaggtaaggtgtagtgtttttaagataagttattataaagattttaaatattaaggaagaggtgtttggttgggatggagtattggggaagaggggttggttagatggtagaaagttggagttgatttgtagtgattgtttatttttaagttttagtttttttatttgttaatggggagtgtttatttttttttttttgttttagggatgtacgagtggtaagtggtggtggggaggtacgagaagagggtatttattattggtattttaaagtaaagttaattggagatttaggtttttaaaaggacgaaggttttggttttgtataaaaggttttcggttttttttttttttaggggagtgtgagttttttagggaaagaggtagtagtaaaaaaattttaggtttggagtgttttttaaggtattttttttaattttttatagtttaattttagtattgttttttttaagcgttaatttttattttaaattttttgttttttggggttttaataattattaaagggaggttggtttttacgttatttttttaaattgtttattaatatatttacgtgttagatagatacggttggggattatacgggtagttttagttaaagagaggcggagatggtttaagagtttgagaagagttaatgtttgattttaggtaggggtagagttttggttatttatggggtggtttttttttggatggttcggggaggtttttattcgagtcgtttgggttttcggattcggagtaggtttgggttttgggttcgtttagcggatagggggcggcgggcgtcgggttgtcggtttcgaggttgggagtgtagttcggggcggcggacgttttgggcgggttttttcggggcgcgttaggagcgagtcggtcgtttatagttttttttagtcgttttcgggtcgagaagtcgttttatatgtagttacggcgtatgatggaggcgtagtttttgttttagtttttcgagtggtttcgggatttcgtttcgttttcggtgtatttttcgggttacggtttcgggggattaatttcgggggtcgggttttttgcgtcgggatttaagttttagggcggcgacgtggggggcgatggtattagttcgaattttttttagatgttttcgttgggcgtcgtggagcggtagaaatttttttcgtagttatagtcgtagaaatagtgttggtacgagtcgtagtttatgttcgttttttgcgggagggaaggggggacgtgttgatcgggtgtcggtcgggcgaaggaggtgttttcgggtttttcggtatagtcggttgtcgggttttcgtttttttttaattttattagtttgtagtttgcgtttagttttcgcgtttcgggaagtcgggtttcgggttagagtggtaggggaagttaatcgtagcgcgcggattcgattgtgggtagcgagtttaaagtaaattttgttagcgtcgttcggagcgtagtttttagggttcggcggggtcgggcgggggcgcgtcgtgtttagaaggtagtttgtagttagttcgtatcgcgggattcgcgttcgtgttttggttattcgtagttttatttcgttttagtcgttcgttatttggagcggatcggtttttcgtcggttcggggtagttcggtagttagtatatacgtatatgcgcgtcgtcgagagcgcggttcgtatttataagcgcgtttttttcgcgcgcgcgttttttttcgttcgcgtacggcggttcggacgttttcgggatcggcgcgggagcgcgagttgtaggcgtattgttttttgattgttttatatttcgtcgcgcgttcgggatttagggattggggggcgggttttatgggataaatttcgttttttttttgtttattacgggtagtcgataggtggggtcggttttattttttggtagcgttcgttcgtttcgtttaattttcggtagttttttaaataaattgtacgttggggagcgtaaataggaggagggttgatgcggttcggcggtcgtttggcggtgttagtcggttgagttaaatcgtgttttttgtttatttcgagttggggaattagggttatttttcgttttattttgcgcgtttatttttttcggcgtatttcgttgggtttaggtgcgttcgagtcgtcgcgaggggtagggggagggaaacgcgttatttggcggtttttagttttgaatttgggttggtttcggcgttcgtttggttattcgtcggttcgttttttgagtttagtggtttaagtttggatggtatcgaagcgaagatttcgggatttagagttcgaaacgtaatttttttgagttttagttttatttgtaaaatgaagggatggtaatgtttattttatagggttgttgtgaggttttagggaaataagagtatttagggaaggggtttggtttaggtggagaggtagacggcgttggtttagttttcgttttggggaggcggtgtagaaatgaggaattttttttagggtaaagttagttgagattcgttatgtttttttttattttatataaaatattgtaggagttgtatagtagagaatgaggatttggtatttggaaaatattgtaggattaagttgttttaagttttgttttgtattgttggttaagatgatagataatttttttgtataattttttttttaaattttaaatatattttgttaagagatagggttttatttagcgttaaggttggagtgtagtggttcgattatgattcgttgtagtttcgaatttttgggtttaaatgattttttttttttagttttcgaaagtgtagggattataggtacgggttatcgtgttgggtttttttttgtgttattttttatatagatgatttttggtggaagagaaaaaattaaattatacggttagtttgagatttaggttagaggagagtaatttgggatagtagttaatatatttagatttttttatttggtattaaggtttggtgtttgtttattttagtttgattgtttgttgttttttttttttttttttatttttgtggtttaagaatattaaattatttattgttggtagacggaagtgagaagggtaagtaatttagtgtggttggagtatgggatacggatgtgtgttgttatatgggttgggaaggtagggaaaatgatagtttttcgttttagatacgttgggtttgtgttgtatgtgggatattttgaaggtagaaatttgtttttatttgttttgtgatttttgtatttagaatagttt

SEQ ID NO: 53 - DNA, 6894 bp, Artificial Sequence
  chemically treated genomic DNA (Homo sapiens)
gatagtttttattattagaatttagagtttaggagtatagttttatattggttttttttaaagtttggattataggattgttttttagaaaagtttgaaagtttttggtaaatagtatttagttatttagttttttttttttagtttttttttagaagagtaattcgagaaaatatttagtagcgtagaggaaagcggtatagtgttgttaatttatttttagtaagatttacggaattttaaaaatatagtttatgggttttaggacgtttgtagttttgttgtttaaaggttttttgtagtattaattttttttttaaattataagtggtgtttataggttttgttgttttttaaattttagagagatttttttttaaatgaaatttagagaatagaaagatttaaaattattttgatttggttagatatagaggtttaagattgttaagttattttgtgtttatttttttattaaagttattaaaatttttttattaaatgaatatttatggaagcgttaagattaattatttttggagttaaatagattttgatttaaattttagttgtgtaatataaagtttgtgggattttagatcggttttttggtttttgggttttaattttttaggggtgagttagattaggggtgagttagagagaataggatttttttgtattgttaataagaggattaaaatgagatttattatgtatagtataggatataagattagttggtatataataagaatttaatatataatagagttttttttttatttttggagtttttaaaaaatataaaaattatatatattttttttggttaaagatgatgattaatataaaaattttattttaggtttatgttttttggattttttaaagagtatttaatagagtgagttatatttggggttatatttgagttattcggggttatgtttttgtgttttgtgatgttgttaattcgatgatttgtgcgttttttttagttaaaaaataaaagtcggttttgtttttttttgtagttttttgaatagttataattattttaattgtttgttttgtttgttaagatttacgtttttaggtaaacgaattaattaagtttttttttgggtatagattataaagttatgaaaaatttgttttttttttttttttttatttattattttatttttgttttttggggagtattgtagagttagagttttttaagattttgtttattgtaagtttaaggtgatggagtttggttttcgggttaggagttaattttagaggttttaataatataagaaagaatgagatttaaagattattttgttaggtgggatggtttatatttgtaatttttagtgttttgggaagttaaagtgggaggatgttttgagtttaggagtttgagataggttttaatagggtatggatagaggaaagtagtatggaattgaagggtggatatttattgtttagtaaattataaattttggaaggaggtggaagggttttagatttgtgttgtttgtagtgaagaaattaagatataaaaaagtaaatgggagaggatagtagacggttttgaatggatgagagttagatatatggtaggtgtagatttttatttaagttttttaagttaaagatattgttgaaatatttggattattgacgttattttatagtaggtttttgtgaagtttaaatggagtgagttttgttttttttaattgttatttagtgtgttttataggtaatttttaagtaggaataataggagtatagtaatgtagtagaatttataaattttatttggtattgagaaaggttaagtcgagaggaaagtgattgttgttaattttattgtagtttgtgttggagtagggggtgttgtgtttggttttttgtatttgttgttattatttttgttatttgtgaaaggagtgtgatatggtggttataaggcgggttttgttgtattttttttagattgtggttttgggcgtttgtttaatttttttggggtagttttttttgggggttgagtgagtgaatgtatttggagaattaggtggtgtttatggtatgttgagtatttataaaggttattaattcgtgttattggttttttaattaagaatggggttatatattatttgtagtttttattattagtttggtagtatttataaacgtgtagtagtaatgtttgattggtggttttttgaagggattttatgggtatattgtgtatttgtttaaatttagggttttttatggatttataggattggtagttgtaggttagtaatgtatagtaattgaagttgggtttttaaattatttgtttttaaaaaaatattataattatttttaatatgtttttttttttttatgaattttattattaaatgtatttgaaattggaaatatatattaattttgattatatttaatggatttatgagatgggagtatttgttttagtagagtttttatatatggtttatgttggttataggtgttggtttttgtattaattaggattttgaagaggaaaataaatagtaggagatgggtagagatataaaagatttattataaggaattggtatatatagttatggggttgcgtagttttaagttttatatttagtaagttggagatttaggagagtagatgatgtgttttggtttgaaagttagtagacgtgagatttaagaggagtttatatttttgtgttagttcgaaggtaggaagagattagtgtttttattaggtagttaggtaggaggagttttttaggtcgtcgaggagttggtttgttatttttaggttttttgttgattggataaggtttttttttattttagagggtttttgttttatttagtaatttgtttaaatgtgtattttatttagaaatatttttagatatatttagaatattgttttattatatatttggtattttgaaatttagttaggttgaaatatgaatattaattattataggtttttttttattatcgatgtttttttagtaggtggggtatagtatataggattttttttatttttgaggtttttttagtaggtgggatatagtatataggttttttttgttattttcgaggtttttttagtaggtgggatatagtatataggttttttttgttatttttgaggtttttttagtaggtgggatatagtatataggtttttttttatttttgaggtttttttagtaggtgggatatagtatataggtttttttttttattttcgaggtttttttagtaggtgggatatagtatataggtttttttttttattttcgaggtttttttagtaggtgggatatagtatataggttttttcgggtttgggtaggaggtacgaaggtgatttatttttgtttgtttaggattgaggtggtttttgagatgtagaatttttggtttttaaattttgtttatgttttaggtaaataaggtaaattggttattttaggtagaatttttatagtagttacgttttgttaatttttttttttcgtatttatcggatttataaatttttttttgaatatttgatttttgatttaattttttttaaggtaattagtttttttttagataagtttttagagtgaggtcgtgatgggtttttcgtggattttagattataggttgtgtttttaaatttgttttttttaggaagtgtttttttcgttacgtggtgttggttttttttattggtgtattgtcgtagttcgtttttattttagagatatagaaaataagaagtttttagaaatgttagttttaggagttttatttttgaaatagaagtgttgacgtttattgtatagttatttttgggaatgatatattagtatttttatcgttattttataggttgtggggttaggtagtgatttagggagacgagtagtgagaaggaatggattaaatatttttcgagtttatcgagtttagttatcgttttttagttagagaaggtagttgtgggtttttttgtttttatatggatttttttttgttttatttttttttttattaagggtatcgttgttgtttatttgtttattttatatttacgtgtgtttacgagaaggatgggagggaaagtggggcggtaaagaataatttttgttattatttttcggtttaaaattttattaaagtttttttttataaagtgtttaagatgagggtttagtatattattttatttaaattataatattttatatatatttttataaatgtaaggggtataaaagtgttattttgttatatggatatatcgtgtagtggtgaagtttgggtttttagtgtatttgttattagaataatatacgtgttatttatagggtaattttttattattcgtttttttttattttttcgagtttttaatgtttattttatattttatatttacgtgtatgtattatttagtttttatatataagtgagaatatgtagtatttgattttttttttttgagttattttattttgataatggtttttatttttatttatgttgttgtaaaagatatgattttattttttttgatagttggggagtattttattgtgtatatgtattatattttttttatttatttatttattgatgaatattttagttgattttatatttttgttattgttattagtgttgtaataaatatatatgtgtaggttttttttaatatattgatttttttatattttatggagggaatagagtttttttaagcgagtgtggttggtttttattttttagtgtattttgtaattaatatttttgtatatttttttttaggtgattgggagattttaatttagatttttagtaagtgttataaggaagaaaagattttgaagaattaattaagtttttcgtgaagttaagtttaagtaatattttcgttttaattataagtaggagaaatgaagtatattattaattcgtatgaaaatattaataatatagtaagaaataatttcgattgttttcgtgtggttttgtcggaggagatattttttataatttttattgttggagttttggagaatttgatcgttttgttggttgtgtttaagaataagaatttttaggtatttatgtatttttttatttgtagtttggttatatttgatatgttgggtagtttatataagattttggaaaatattttgattatattgagaaatatgggttattttaagttacgtggtagttttgaaattatagtcgatgatattatcgattttttgtttgttttttttttgtttggttttatttttagtttgtttgtgattgttgcggatcgttatattattattttttacgtattgcggtattatagtatcgtgattatgcgtcgtattgtggtggtgtttacggttatttggacgttttgtacggggattggtattattatggtgatttttttttattatgtgtttatagtgattatttttacgtcgttgttttcgttgatgttggtttttattttgtgtttttatgtgtatatgtttttgttggttcgattttatattaggaagatttttattttttttagagttaatatgaaaggggttattatattgattattttgttcggggtttttattttttgttgggttttttttgtgttttatgtttttttgatgatattttgtttaagtaatttttattgcgtttgttatatgttttttttttaggtgaacggtatgttgattatgtgtaatgtcgttattgatttttttatatatgtttttcggagtttagagtttagggacgtatttaaaaagatgattttttgtagtaggtattggtagaatggttgatttttggttttagaatttatgggaataacgttgttaagtgttagaatagtgtaatattttaataaatgttagtgttttttattggttttttttttttaatggatgtaaggatgattttattagttagtgtttttaatagttaggttttatgtgaatagttttattgtaggggtaattttttaattttgtgattggatagataaaacgatgtagtaaaagaaggatagaatataaagtattaggtaggtataaaagtaattaaggtttttgttattatttttaatgattaaaaattgtaattatttttgtattaatttagtaaaatagtaataaaaatttaagggttttgggttaaggtaaagatttgtttttttgtggatatttaataagttagttttgaggtggtttttttaggtggaggttattgtagttaatttttagaagttaagtatttggatatgcgattttaggtagaagatgtagggtttttgtaagttaataataaattggaaggaatgtattgttgtagttgaatttgtttgttttttatagttatgtggaatttttatttttttttttttttttgttagtttgatgtattgatgttattttagttttagaaagtaggttgagtataaattataaatgttaaataacgagtttcgagtttttaatgataaatggattttttttgttagttttttttgtttatttagtattttattggttttaaaatttttttttgttatatttttttatgttttatgagtatatattttaaaggaagaaatgaaaatttaatttatttagtttttatgtgggaatatataaaggttagatgaaaattgttattatttgaagaagttgtaattaaattatgtgtgttataatgtagaagtataagaaaagagttttaatatgtattttaagaaataaagagagagagatagagatagatagagagagagagagagagagagagagagagtgt

SEQ ID NO: 54 - DNA, 6894 bp, Artificial Sequence
  chemically treated genomic DNA (Homo sapiens)
atattttttttttttttttttttttttttttttgtttgtttttgtttttttttttttattttttaaaatatatgttggggttttttttttgtatttttatattgtaatatatatagtttggttatagtttttttaaatagtgataatttttatttggtttttatgtatttttatatgggaattaaatggattaaatttttatttttttttttgaaatgtatgtttataaagtatgaggaaatgtaataggaaagggttttaaggttagtgggatattgagtgagtaaagaagattaatagagaaggtttatttattattggaaattcgaagttcgttatttgatatttatagtttatatttagtttattttttgaaattgaggtggtattaatatattagattaatagggagaaagaggagggtggagattttatatggttgtgggagatagataaatttagttgtagtaatgtattttttttaatttattattggtttatagagattttatattttttgtttggagtcgtatgtttaggtatttaatttttggaaattggttgtaatggtttttatttggaaaggttattttagaattggtttgttagatgtttataggaaagtaagtttttgttttagtttaaagtttttgaatttttattgttgttttattagattggtgtaaaagtaattgtaatttttggttattgaaagtaatggtaaaaattttaattatttttgtatttatttaatattttgtattttattttttttttattatatcgttttatttgtttagttataaagttaagaggttgtttttataataagattgtttatatagaatttagttattagaaatattagttggtgggattatttttgtatttattagggaaggaaggttagtgaggagtattggtatttgttggaatgttatattattttggtatttggtaacgttatttttatggattttaaaattagggattagttattttattagtatttgttgtagaagattatttttttgaatgcgtttttgagttttgggtttcggaaggtatatatgaaggggttaatgacggtattgtatatgattaatatgtcgtttatttggaagagagatatgtagtaggcgtagtaggggttatttgggtagaatgttattaagaggatatgaagtataaagggggtttagtagaagatgaagatttcgagtaggatggttagtgtgatggttttttttatgttggttttggggagggtggagatttttttggtgtgggatcgagttagtaggaatatgtgtatatagaggtataggatgaagattagtattagcgggaatagcgacgtgaaggtgattattgtgggtatatgatgggagaagattattatggtgatgttagttttcgtgtagaacgtttagatgatcgtaagtattattatagtgcggcgtatggttacgatgttgtggtatcgtagtgcgtggaagatggtgatgtagcggttcgtagtaattatagataggttgaagatggagttaagtagggagaggataaatagggagtcgatgatgttatcggttgtggttttaaaattgttacgtggtttgagatagtttatgttttttaatatgattaggatattttttaagattttatataggttgtttagtatattagatatggttaagttatagatgaaaaagtatatgggtgtttggagatttttatttttgaatatagttagtaggacgattagattttttaaaattttaataatggaaattgtgaaaaatatttttttcggtaaaattatacgaggatagtcggaattattttttgttgtgttgttgatgtttttatacgagttgataatgtgttttattttttttgtttgtggttaaggcggggatgttatttggatttgattttacggaaaatttgattgattttttaggatttttttttttttgtagtatttgttggagatttaagttaaaattttttaattatttaaaagggagtatatagaaatattagttgtaaagtatattagaaaataaaaattagttatattcgtttaaagaaattttattttttttataaaatataaagaaattagtatattagaaggagtttgtatatgtatgtttattgtagtattagtgataatagtaaagatatggaattaattaaagtgtttattaatgggtgaatggataaagaaaatgtggtatatatatataatggagtattttttagttattaaaaagaataaggttatgttttttgtagtaatatggatggaagtggaggttattattaaagtgaaataatttagaaagaggaagttaaatattatatgtttttatttatatgtgggagttaaataatgtatatacgtggatatagagtgtggaatggatattggagattcggaagggtgggagggggcgggtgatgagaaattattttatgggtaatacgtatgttattttgatgatagatatattaaaagtttaggttttattattatacggtatatttatgtaataaaatggtatttttgtattttttatatttataaaaatatatataaagtgttgtaatttaggtaaaataatatattgggtttttattttaagtattttgtgagaaaaagttttagtggaattttgagtcgagagatgatagtaaagattattttttgtcgttttatttttttttttatttttttcgtgaatatacgtgagtgtgggatgaatagatgaatagtagcggtgtttttgatgaaaaaagaggtaaagtaaggaaaggtttatgtgggagtaggagagtttatagttgttttttttgattgggaggcggtggttgggttcggtggattcgggagatgtttagtttatttttttttattgttcgtttttttgggttattgtttgattttatagtttgtgggataacggtaaaggtgttgatgtattatttttaaagatgattatataatgagcgttagtatttttgttttaaaggtggagtttttgggattggtatttttggagattttttattttttgtgtttttggggtgaaggcggattgcggtagtgtattagtggggaaagttagtattacgtggcgaggaagatattttttagggaggataaatttgggagtatagtttatgatttgaagtttacggggagtttattacggttttattttagggatttgtttggaaaggaattaattattttggaaaggattgggttagaggttaagtgtttagaaggaggtttgtgggttcggtggatgcggaaggaaggggttgatagggcgtagttgttgtgagggttttgtttggaatggttaatttattttgtttgtttgaaatatggatagggtttaaaagttagaagttttgtattttaggaattattttagttttgggtagatagggatgagttattttcgtgttttttgtttaggttcggggaagtttgtgtgttgtgttttatttgttggggaagtttcggggatgggaggggaagtttgtgtgttgtgttttatttgttggggaagtttcggggatgggaggggaagtttgtgtgttgtgttttatttgttggggaagttttagggatgggagggggtttgtgtgttgtgttttatttgttgggaaagttttagggatggtaggggaagtttgtgtgttgtgttttatttgttggggaagtttcggggatggtaggggaagtttgtgtgttgtgttttatttgttggggaagttttagggatgggaggggttttgtgtgttgtgttttatttgttggggaagtatcggtgatgggagggggtttgtggtggttggtgtttatgttttagtttgattgagttttagggtgttaggtatgtggtgagatagtgttttaggtgtgtttgagggtgtttttgggtgagatgtatatttgaataggttattgagtaaaatagaggttttttgggatgggggagggttttgtttaattagtagaaagtttgaggataatagattagtttttcgacgatttggggggttttttttgtttgattgtttgatggagatattggtttttttttgttttcggattagtatagaagtgtgagttttttttaggttttacgtttgttggtttttagattagaatatattatttatttttttgggtttttagtttgttgagtgtagagtttgggattgcgtagttttataattgtgtgtgttaattttttatagtaaattttttatgtttttatttattttttgttgtttatttttttttttagaattttggttaatataggggttaatatttgtggttagtatgggttatgtatggagattttgttgggatagatatttttattttatgagtttattaaatgtaattagaattagtatatatttttaattttagatgtatttgatggtaaaatttataaaaaaaaaaagatatgttgaaagtggttgtaatatttttttagaaataggtggtttgggagtttagttttagttgttgtgtattgttgatttgtagttgttaattttataaatttatggggagttttgaatttggatagatatatagtgtgtttatggggtttttttaaaaggttattaattaagtattgttattgtacgtttgtggatgttgttaagttggtggtgggggttgtaggtggtgtgtggttttatttttggttgaagggttagtgatacgaattggtggtttttatgagtgtttagtatgttatgggtattatttaattttttagatgtatttatttatttaatttttagaggaagttattttagaaaggttgggtaaacgtttaaagttatagtttggagaggatatagtagagttcgttttgtgattattatgttatattttttttataagtggtaagggtaataataatagatgtaagagattagatatagtattttttattttaatataaattgtaataaaattgatagtagttatttttttttcgatttggttttttttagtgttaagtaggatttgtaaattttgttgtattgttatgtttttgttgtttttgtttagagattgtttgtagaatatattaaatgataattagaagaagtaaaatttattttatttaaattttataaggatttgttgtgaggtggcgttaatgatttaaatattttaataatgtttttggtttaaagaatttggataggggtttgtatttgttatatgtttggtttttatttatttaaagtcgtttgttgtttttttttatttgtttttttgtgttttgatttttttattgtaaataatataggtttagagtttttttatttttttttagggtttgtggtttgttgggtaataaatgtttattttttaattttatgttgtttttttttgtttatattttattgaaatttgttttaagtttttgggtttaaggtatttttttattttagttttttaaggtattggggattatagatatgaattattttatttggtagagtgatttttaaattttatttttttttatgttattggaatttttggagttaatttttggttcgaagattaagttttattattttgagtttgtagtaaataaggttttagaaggttttaattttgtagtgttttttaggaggtagagatggggtggtggatgagaaaggagaaaagagataagttttttatagttttataatttgtatttagaaagaaatttggttgattcgtttgtttgaaggcgtaggttttggtaggtagagtagataattggggtagttataattgtttaagggattgtaaggaaaagtaaaatcgatttttgttttttggttgggaggggcgtataaattatcgagttaatagtattatagggtataagaatatggtttcggataatttaaatgtggttttaaatgtggtttattttgttagatgttttttggaaagtttagggagtatgggtttaaagtgagatttttatattgattattatttttgattaaaaaaaatatatatagtttttatattttttaaaggttttaagggtaaggagaaggttttattatgtgttaaatttttgttatgtgttagttggttttgtgttttgtgttgtgtatggtgggttttattttaatttttttgttgataatataagggagttttattttttttgatttatttttgatttgatttatttttgaggagttgaggtttagagattaagagatcggtttaaagttttataggttttgtgttgtatagttgggatttaaattaagatttgtttggttttaaaaatgattaattttagcgtttttatgaatatttatttgataaggaagttttaatggttttagtaaaaaaatgaatataaaataatttaataattttaaatttttgtatttgattaaattaggatggttttaaatttttttgttttttaaattttatttagagaaaaatttttttgaaatttagagaatagtaagatttgtagatattatttgtggtttaggaagggagttaatgttatagaaagtttttgagtagtagggttgtaggcgttttggggtttatgggttgtgtttttggggtttcgtggattttgttgaagataagttagtaatattgtgtcgtttttttttgcgttgttgggtgttttttcggattgtttttttggagaagagttggggaaggaggattgagtggttgagtattgtttattaggggtttttaggtttttttagagggtagttttgtaatttaggttttagagagagttagtgtaggattgtgtttttgagttttgggttttggtggtgggagttgtt

SEQ ID NO: 55 - DNA, 1157 bp, Artificial Sequence
  chemically treated genomic DNA (Homo sapiens)
ggattttgttttttttgaaggttttagggaagagtgttttttgtttttttcgaaggttttagggaagggtttgtttttttaggtttttggtggtttgtaggtgtagttttttaatttttttttttaagcggtttgttgtttataaggatacgagttatattggatgaggggtttattaattgatggtttttgtaaagtttttatttttaaataaggttatattgtgaggtattgggagttaggattttaatatagtttttttggtggatataatttaatttttaataacgtttatataattttaagtagggtttggtattttgtgtgttttttggagagcggttgagttaggttttggtagtgtttaggttatcggtgattgtagtttttggacggtatcgtttattataggttttggaggttgtttttacggttttttgatagggtttttgttggtttgggggtttttgattaggggagcggttttaggaggggagagattcgcgtttcgggtttagcgtagtcgtttcgagtaggatcgggatttttattaagcgggcgtcgttttacgattttcgcgcgtttttaggattattcgggtacgtggtaggtcgtttgtacgttcgcggattatttttgtgataggaaaaggtacgggttatttggtaaattaaggtatagagttttaggcggaagttgggaaggcgtcgttcggtttgtatcggtcgaagggttattcgggttaggcgtatagggtagcggcgttgtcggaggattagggtcggcgtgtcggcgtttagcgaggatgcgtagattgttttaggttcggcgtcgtcgtattgggtatgcgtcgattcggtcgggcgggaatatttcgtttcgttcgggtttcgttttagtttcgttttcgcgcgtttcggtttcgttttcgcgcgtttttttgttttttttaggttttcggtttcgtttcgttttagatttcgttttacgtcgttattttcgtgtttttcggtttcgttttcgcgtttcggatatgttgggatagttcgcgtttttagaacgttttgcgtttcgacgttcgtaggttttcgcggtgcgtatcgtttgcgatttggtgagtgtttgggtcgtttcgttttcggaagagtgcggagttt

SEQ ID NO: 56 - DNA, 1157 bp, Artificial Sequence
  chemically treated genomic DNA (Homo sapiens)
gagtttcgtattttttcgggagcgaggcgatttagatatttattaagtcgtaaacggtgcgtatcgcgaggatttgcgggcgtcgggacgtaaagcgttttaggggcgcgggttgttttagtatattcggggcgcgggggcggggtcgaggggtacggggatggcggcgtggggcggggtttagagcggggcggagtcgaggatttgagaaaagtaagagagcgcgcgggggcggggtcggggcgcgcgggggcggagttggggcggagttcgggcggggcggggtgttttcgttcgatcgggtcggcgtatgtttagtgcggcggcgtcgggtttgaggtagtttgcgtattttcgttggacgtcggtacgtcggttttggtttttcggtagcgtcgttgttttgtgcgtttgattcggatggtttttcggtcggtataagtcgggcggcgtttttttagttttcgtttgaggttttgtgttttagtttgttaaatggttcgtatttttttttgttatagggatagttcgcgggcgtgtaagcgatttgttacgtgttcgagtggttttgaaagcgcgcgggggtcgtaggacggcgttcgtttagtgagaatttcggttttgttcggggcggttacgttgagttcggagcgcgagtttttttttttttggggtcgtttttttagttagggatttttagattagtagagattttgttagggggtcgtgggggtagtttttagggtttgtggtgggcgatgtcgtttaggggttgtagttatcgatggtttagatattgttagagtttgatttagtcgttttttagagagtatatagggtgttaggttttgtttggggttgtgtggacgttattaggagttgaattgtgtttattagagaagttatgttggagttttaatttttagtattttataatgtgattttatttggagatggggattttatagaagttattaattagtgggttttttatttagtatgattcgtgtttttataggtagtaggtcgtttggggaggaggattggagggttgtatttgtaagttattagaagtttaagaggatagatttttttttggagttttcggagggagtagaggatatttttttttggagtttttagagggagtaggattt

SEQ ID NO: 57 - DNA, 8093 bp, Artificial Sequence
  chemically treated genomic DNA (Homo sapiens)
ttatggaaggaaatgagattagttagcgagttgatatagaataaggtagtttaaaataaatttttttaaaaatacgaagaatagatattgaagggaagaggtgtttgtaaagattaagaaagtatatttggagatggtatttttttaaagttaaagttattaagtgtttaagtgttttaaggagggtaagattattaataaggatttagtatagtagagtaatttgagtggtaatacgggatattgggaatataaatttgttaagaaaattagtaggaatgagttataggatagtaattggtaaggatttaataattttttttttaatgtacgtattttaattatatttattgttataataggattagtaataattatatttatttaaaaaaaaaaagattgttatgtagttatagaattatttaatatagaaaatagtaaaatatatttttttttttttttttttttttttttttttttataaataagattagtttatagtaaattttttatagttaagggttaatttaaaatttttggtttatattttttttttatttaatgattatatgatgtaaattaattttattaatattttaagtaaaatatattggaattttataaaatgtataagattttaatatttaaggaattggggttagaaagtagaagtggtttttaggttttttagttttttttttaagtaataaagttttgttgtgaatatttaaagttattgggaaattatcggtagatttttttgtttttttttttcggttttttattatgttgtttttttagatatgtaagtttattttattaattaaaattttagtttgattatttttgataagtatttaatcgatatgtaattttttttttgttttaaatatgtataataggatagagtttttaaatttgatttaattattaatttttgatttataagtgttatggtgagttaatagaatttattaatgtttttattgtattttattagttaaatttagaaggttggaattagttttttttatttagtattttgttagtttgtttagtttgtatttttaattttgtttttaatggtaatttgttttattttttgaaataaaataatttatattttgggagggttaattttttattgtgttaggttgttttatgtattgtaggggtgagtgtttttaggtttaaatgttaatagaagtttttagtaaatatgataattaaaaaagtgtttttatatattttttagtattttttggaatgataggttattgtttttagttgaaagttattggtataattttggtttttaagtttttatgttatttattttaattgtttagatattaattttatttaaatttttagttatagtttggttttttgaatttgttggattagtaattatagattaaggtgttttaatagttaagataggattttggaataagagtttttaaattgtataatatttgagaggatttatgaatataaattgggttttgtttataattagttttatataatgaattttaagattgtttttttatggtgaatagaagtttggaaattattgttttggtataaagtagattattttagtagaaatatagaattattgtaatttgtgaataagattgtttttaaatatttttatttgtgtgttattttatatatagaatgtgtacgatagttttaaattttagaataaatttatttttagtatttaataaaatttgatattgtattattttaaaataaagtgtttattttaggtaggattttttaaaataaagtagtaatatttacgtagataagataaaaaagttaaaatattttatattttttaattttggagtgtaattttttttttttatcgtttttgatagggttaaatttgtgtttatagtaaaaaaaaaaaaaaaaagaattattaattggtaattattaagattttatatttattatagttttttaataggtaagttgataaaatagtttttagttattaaaaaaaaaatttaaggaaaatttttaataattagttttatttttaaattgtatgaagttttttatatttgaaatttaaaaatgattttaatgattttttttattagtaatgtgttattattgaggtgggtgatggggagggaagagggaagaaatttgttagtattattttcgaatttagaaatgtttaaaaaaaagttttaaatattttgatggttagataaaatatttttattgttatgtatgggttttttttttggaaatttatgaatttgttatgtgagtttttgtaaattggtttaaaagtatatttaaggagttgataatttaagattatatgaattagaattttaatattttattaaaataagagttgaaatttttggtatttatttttagaatatttaaaaaatagattgtaaatttaatttatattaatattaaatttttttaaaattaattatattataaaagataatgattttgttattaaattaagttttaaaaaaggtggtatttttatgttttagttttatgttgttatttgagatgaaaaaaaaggtaattgttagaattttaattgtgattagtttggacggttggtatttggtatttttttataatttaaattagtaaatttgaaaatttaaattaatttttgtttttagaattaaatttttgttgagttttttaattttgtattataaagttttatggattagatttattttttttttttataaggttattttaatcgggttttattttagttgtggtaattcgaaatagggtttggagatgtttatttgttaatggttgatttaaagtgtgttggtttcgagttaaatatgaaaaagtttttttatagatttggttattattaaataaggatgttattttataggtaatttttttgataattgggtaggatttagtagataatttagtataaaattgttttaagtttttgattttgtatttattttaaagattagtgtttgtttgaagttttgttagttttatttttattgaaataggtgtatatttaggtttaaagttaaatggatttgaaaaaagttttaagttttttttaatgaatttgaggtttttaaaatgttttttaaattttttttggagacgatagattattatttgatatttattaggattaaatatttttttattttttttattttgttgttttagtttattaataatttttttgagggtaggaaagtttgttagatttttttttttaatatgtttttgaaataaatttagtttaatttcgaaagtataaatatggttaaaggtagtagtagtaaagattttattaattcgtaattttttattgagttttcgaaggtgttttataatgtttattaagaagttaaagttataaagttattgtttgtttgagaagtggattgttgttgtttttattgaaattaagaacgtttttatttttttttttagagagaatattagttttaaagtttttttttttttaagttaattgtttagatatcgtttattaatttttttattatgttttgatttagatttcgttagtaaagtttgaaatttaggtcgtttaacgtttttggttttaattaaaattatttattcggatatggtatttatgatttgattaatatttatattataggagtttaatagttttaagtgaagaaattttgaataatgaatgatattttaatagttggggtttacggtttttttttttatgtatgagacgagttttgagtttttattaattatttttaaagtatgggtcgtggttagtttaattattttttgtaagttaagttttgttgtttgtagggattttaggattgtcgatatgagcgtattaatattgaaatgatgagttaggttgattatggttagaagatttttttgtatttttaatttagggtttatatcgcggataaagattaggaggtagtttttataggttataaaagtttggtcgtttaaggtaagagaataggttttaaagtttttggttcggttaaaaagttggttgcgtagatttttgttaatgtttaggattttttgttttgtgatatttggagataagttaacgttttgtaggacgtttatatgttcgggtagtattttttttagtaatatttttatgtattggtatataaagttttttttattttagtcgcgattttttaaggttaagaggcggtagagttcgaggtttgtacgagtagttttttttttaggagtgaaggaggttacgggtaagtcgttttgacgtagacgttttattagggtcgcgcgttcgtcgttcgttatatatcgttcgtagtattcgtgtttagtttcgtagtggcgtttgacgtcgcgttcgcgggtagttacgatgaggcggcgatagattaggtatagggttttatcgtttttcggaggttttattattaaataacgttgggtttattcgggtcggaaaattagagtttcgtcgatttttattttgttttttttgggcgttatttatattttgcgggaggttataagagtagggttaacgttagaaaggtcgtaaggggagaggaggagtttgagaagcgttaagtatttttttcgttttgcgttagattattttagtagaggtatataagttcggtttcggtatttttgtttttattggttggatatttcgtatttttcgagtttttaaaaacgaattaataggaagagcggatagcgatttttaacgcgtaagcgtatatttttttaggtagcgggtagtagtcgttttagggagggacgaagagatttagtaatttatagagttgagaaatttgattggtatttaagttgtttaattaatagttgtcgttgaagggtggggttggatggcgtaagttatagttgaaggaagaacgtgagtacgaggtattgaggtgattggttgaaggtattttcgttgagtatttagacgtttttttggtttttttggcgttaaaatgtcgttcgtggtaggggttattcggcggttggacgagatagtggtgaatcgtatcgcggcgggggaagttatttagcggttagttaatgttattaaagagatgattgagaattggtacggagggagtcgagtcgggtttatttaagggttacgatttaacgggtcgcgttatttaatggcgcggatacgtttttttgttcgggtagaggtatgtatagcgtatgtttataacggcggaggtcgtcgggttttttgacgtgttagttaggtttttttttttttcgtagatcgtgtgtttttttatcgttttttttcgagattttttaagggttgtttggagtgtaagtggaggaatatacgtagtgttgttttaatggtatcgttaattaagtaaggaagttatttaatttaaaattatgtatgtagaatatgcgaagttaaaagatgtataaaagtttaagatggggagaaaaatttttttttagagggtattgtgttattgtttttttgttttttatttattttagaaattatttgtttatatttaaaggtataatttattttgagttttttttaaaataaatcgtttgtagttttaggataggttgatgtattttgggtttgatttttgattattttattgttaaattagtgattttttttagtgtttttttgttttttatttcggaggacgtatttcgaagatattagattttatgggttatttttggattttgaagtttataattgtgataaaaaatgtgaagggaagagatttgaaatatgtggaaggaaaagtgagtgtagattataaatttttaaaaagataagtttaaaatatatttaaacgttatgttagattattttgttaaaattagttgttagtgacgttcgtacgttaatagaaaaaagaatgttttagtttggagtggtaggtttttagagggatttattgtgaaagtataaattatttagggtaatgggattgagagaatagtgggtagaaaggattattgaaggaaaggaagagaattggaaggtagatgaaagaaggagtaagaatttggggatgtttttttttttttatttgtaatagtagtaatagaagtaatggtagattggtttttgtttttattgtgttagaatgaattgataggataattgggtttattattgtattgtgttagaatattgtaaaataaaattaaatatattagtttggtggtttgtaattaattatttaagtggagatttttattttttttttattttttttttagacggagttttattttgttatttaggttggagtgtagtggcgcgattttagttgattgtaattttttttttataggtttaagggagatttttttgttttagtttttcgagtagttaggattataggtatgtgttattatatttggttaattttgtatttttagtagagatgggatttttttatgttggttaggttggtgttaaaattttcgattttaggtgaatcgtttgttttagttttttaaagtgttgggattataggcgtgagttatcgcgttttgtagttttttgtatttttaatagagatagggttttattatgttagttaggatggtttcgattttttgattttaggtgatttgttcgttttggttttttaaagtgttgggattataagtatgagttatcgcgttcggtttaagtggagatttttatatggagtttagttatattttttttaatatataagttgagatgattaatataattttaatataggggtttatgagaaatgtttgtaatatttaagtaatttattgtttttttttttttttttttaagatgaagttttattttgttgtttaggcggaagtgtagtggcgtgattttggtttagggtaatttttgttttttggttttaagcgatttttttgttttagtttttcgagtagttgggagtataggcgtgtatgattatattcggttaatttttttatttttagtagagacggggtttttttatgttggtcgggttggttttgaatttttgattttaggtgattcgtttattttagtttttttaagtgttgggattataggtgtgagttttcgtgtttagtttattattttatttttgaataaagaattgtttgtgtggggaatagataatttttttttatgtagtttttgttagaaaatttgttttttttagtagttggtttgtgtttataggttattttttgaaagtataaaaaatttattgattttttttttttgggtttttttttttttttgagatagagttttgtttttgttgtttaggttggagtgtaatggcgcgattttagtttatcgtaatttttattttttgggtttaagtgatttttttgttttagttttttgagtagttgggattataggtatgcgttattatgtttggttaattttgtatttttagtataaatggggtttttttatgttggttaggttggttttaaatttttgattttaggtgatttattcgttttggttttttaaagtgttgggattatgggtgtgagttattgcgtttggttagaaaatttattgattttttaaagatttattaattttttgtattattttttttttttttttttatcgtaaatataaaagggaatagtagagaaaattatttagaattttattttttagtgatattatttagtgatattttattagagttatttaggaatttgaggttgaataaagtttaggtaaaagtaaaattagttgagaagagatatttgttaaaagaaatttatttttaattttatttgttgttttttttagaggaatagaaatagtgttgaatgttttattagaaatgatggttgttttgttcgtttttttttttttttttatataatatgtaaatttatatagtgtatgagtttgtaagataaaggaaaaatacgttaatgaggtattattgtttgtatttggagtttgttattattgtttggtttatattaaaatatgtatattagagtagttgtagattgataaattattttttgtttgatttgttagt

SEQ ID NO: 58 - DNA, 8093 bp, Artificial Sequence
  chemically treated genomic DNA (Homo sapiens)
attggtaaattaaatagaaaataatttattagtttgtaattattttaatgtatatattttaatatgagttaagtaatgataataaattttaaatataaataatagtgttttattaacgtgttttttttttgttttataggtttatatattgtatgagtttatatattgtgtgagagagagggaagagacgggtagagtaattattatttttaataggatatttagtattatttttgtttttttaggaaagatagtaagtgaagttaaaaatagattttttttggtagatgtttttttttaattaattttatttttatttgaattttatttagttttaggtttttaagtgattttaataaaatgttattaaataatgttattaaaaaataaaattttgaatgattttttttattatttttttttatatttacgatggaggggaaaaaaaaaagtaatgtagaaagttaataaatttttaggaagttaatgaattttttggttaggcgtaatggtttatatttataattttagtattttgggaggttaaggcgggtggattatttgaggttaggagtttgagattagtttgattaatatggagaaattttatttgtattaaaaatataaaattagttaggtatggtgacgtatgtttgtaattttagttatttaggaggttaaggtaggagaattatttgaatttaggaggtggaggttgcggtgagttgagatcgcgttattgtattttaatttgggtaataagggtaaaattttgttttaaaaaaaaaaaaaaatttaaaaaaaagaagttaataaattttttgtgtttttaaagagtagtttataagtatagattaattgttagagaaaataaattttttagtaggggttgtatgagaaagagttatttattttttatatagataattttttatttagaaataagataataggttgggtacgggggtttatatttgtaattttaatatttggggaggttgaggtgggcggattatttgaggttaggagtttaagattagttcggttaatatggagaaatttcgtttttattaaaaataaaaaaattagtcgggtgtggttatgtacgtttgtatttttagttattcgggaggttgaggtaggaagatcgtttgaaattaggaggtagaggttgttttgagttaagattacgttattgtattttcgtttgggtaatagagtaagattttattttaaaaaaaaaagaaagaagataataagttatttaaatattatagatattttttatgagtttttgtattgaagttgtattagttattttaatttatatattaaaaagagtataattggattttatataaaaatttttatttgagtcgggcgcggtggtttatgtttgtaattttagtattttgggaggttaaagcgggtagattatttgaggttaggaaatcgagattattttggttaatatggtgaaattttgtttttattaaaaatataaaaaattgtagggcgcggtggtttacgtttgtaattttagtattttggaaggttgaggtaggcggtttatttgagatcgagagttttgatattagtttgattaatatggagaaattttatttttattaaaaatataaaattagttaggtgtggtggtatatgtttatagttttagttattcgggaggttgaggtaggagaattttttttgaatttgtgaggaggaggttgtagttagttgagatcgcgttattgtattttagtttgggtgataaagtgagatttcgtttaaaaaaaaaataaaaaaaaaataaaaatttttatttaagtaattaattataagttattaagttagtatgtttagttttgttttatagtattttggtatagtataataataggtttagttgttttgttaatttattttaatatagtagaaataaaagttagtttgttattgtttttgttattattattataagtgaaaaggaaaaaatatttttaggtttttgtttttttttttatttattttttaatttttttttttttttttagtggttttttttatttattgtttttttagttttattgttttgaatagtttatatttttataataaatttttttagaaatttattattttaaattgaagtatttttttttttattaacgtacggacgttattaataattgattttaataaaataatttgatataacgtttaggtgtattttgggtttgtttttttggaagtttatagtttgtatttatttttttttttatatgttttaaattttttttttttatattttttgttatagttataagttttaaaatttaaggatgatttataaaatttggtattttcgaagtgcgtttttcgaaataaaggataggaaaatattaagaggggttattaatttaataatagggtaattagaagttaagtttaaagtgtattagtttgttttaaaattataaacgatttgttttgaaagaaatttaaaatgaattgtgtttttggatgtgaatagatgatttttggaatgaatgaaaagtaagaaaatagtaatatagtattttttgaaaaaaggtttttttttttattttaagtttttatatattttttaatttcgtatgttttgtatatataattttaaattaagtggtttttttatttagttaacggtattattaagataatattacgtatatttttttatttatattttaaataatttttaaaaggtttcgggggagagcggtaaagaaatatacggtttgcggaaaaggagaaggtttgattggtacgttagggaattcggcggttttcgtcgttgtgggtatgcgttgtatatgtttttgttcgggtaaagaggcgtgttcgcgttattgagtgacgcggttcgttaagtcgtagtttttaagtgagttcggttcgatttttttcgtattagtttttaattatttttttgatagtattagttggtcgttggataatttttttcgtcgcgatgcggtttattattgtttcgtttagtcgtcgaataatttttgttacgaacgatattttggcgttagaagagttaaggaaacgtttagatgtttaacggaagtgtttttagttaattattttagtgtttcgtgtttacgttttttttttagttgtagtttacgttatttagttttattttttagcggtagttattgattggatagtttgaatgttagttaaattttttaattttgtgggttgttgggttttttcgtttttttttgaagcggttattgttcgttatttagaaggatatgcgtttgcgcgttagagatcgttgttcgttttttttattggttcgtttttaggagttcggggaatacgaaatatttagttaataggagtagagatgtcggaatcgggtttgtgtgtttttgttgaggtgatttggcgtagagcggaggaggtgtttggcgttttttaggttttttttttttttttgcggtttttttaacgttggttttgtttttgtggtttttcgtagaatgtggatgacgtttaaaagaagtaagatggaagtcgacgaggttttagtttttcggttcgagtggatttagcgttatttggtggtggagttttcggagggcgatggggttttgtgtttggtttgtcgtcgttttatcgtagttattcgcgaacgcgacgttaggcgttattacgaggttgagtacgaatattacgagcggtatgtggcggacggcgagcgcgcggttttggtggagcgtttgcgttagggcgatttgttcgtggttttttttatttttgaagagagagttgttcgtgtaggtttcgggttttgtcgttttttggttttgaagggtcgcggttggggtgagggggattttgtatattagtgtatggaggtgttgttgagagaggtattgttcgagtatgtaagcgttttgtaaggcgttgatttatttttagatattataaggtagaggattttgagtattgataggaatttacgtaattagttttttaatcgagttagggattttaaagtttatttttttgttttggacgattaggtttttgtggtttatgagaattattttttggtttttattcgcggtgtaggttttgagttggaggtgtaagaagattttttgattataattaatttgatttattattttagtgttggtgcgtttatgtcggtaattttagagtttttgtagatagtagggtttagtttgtagagaatggttggattgattacgatttatattttgaggatgattggtgagaatttaggattcgttttatatatgagagaaaaggtcgtaagttttaattgttggaatgttatttattatttaggatttttttatttggaattgttgagtttttatgatgtagatgttaattagattataaatattatattcgaatggatagttttgattaagattagaggcgttaggcgatttgaattttagattttattaacggaatttgaattagagtatggtgaaagggttaatggacgatgtttgaataattggtttaggagagggaaaattttaaaattaatattttttttaagaaaagaaatggaagcgtttttggttttagtaggggtaataatagtttattttttagataaataatggttttgtgattttggttttttggtggatattatggaatattttcgagaatttagtgaagaattacgagttagtaaagtttttgttgttgttgtttttgattatatttgtattttcgaagttaagttgaatttattttaaagatatattgaggaaaaaaatttaatagatttttttgtttttagagaagttgttgatgagttaaaatagtaaaataaggaagatgaaaaaatatttgattttgataggtattaaatggtgatttgtcgtttttaaaaagaatttgagagatattttaaggattttaggtttattaaaaaggatttagaattttttttaaatttatttaattttaaatttgaatatgtatttattttagtgagggtggagttaataaaattttaggtaaatattaatttttggaatgaatatagaattaaagatttggggtagttttatgttggattgtttgttgaattttatttaattattaaaggggttgtttgtaaggtggtatttttgtttgatagtaattaaatttgtgaaaaggtttttttatatttgattcgaaattaatatattttgagttagttattaatagatgagtatttttaagttttgtttcgggttgttataattgaaatggagttcggttgggatgattttgtgagagaaagaaatgaatttaatttataaggttttgtagtataagattgaaaaatttaataagaatttaattttaaaagtaaaaattggtttgagtttttaagtttattaatttggattgtgagaaagtattaagtattagtcgtttaaattgattataattaaaattttgatagttgtttttttttttattttaaatggtagtatgggattgaaatatgagaatgttattttttttaaaatttagtttagtgataaagttattgttttttatgatatagttaattttaaagagatttagtattaatgtgagttgaatttgtagtttgttttttaggtgttttgaagataaatgttaaaaattttagtttttattttaatggagtgttaaaattttgatttatatagttttaaattattaattttttaaatgtgtttttgaattaatttgtagaagtttatatagtaagtttataagtttttaaaaaggaagtttatatataatagtggaggtgttttgtttaattattaaaatgtttgagatttttttttaaatatttttgagttcgaaggtaatattgatagatttttttttttttttttttttattatttattttagtgataatatattattgatagaggaagttattagaattatttttaagttttagatataggagattttatgtaatttggagataagattaattattgggggttttttttggattttttttttaataattgggggttattttattagtttgtttattaaaggattatggtaagtatagaattttaatggttgttagttagtaattttttttttttttttttttattgtagatataagtttggttttattaaaaacgatgaggaaaaaagattgtattttaggattaggaggtgtgagatattttagtttttttgttttatttgcgtgggtattgttgttttattttaaaaaattttgtttaaagtaaatattttgttttaaaatgatatagtattagattttgttagatgttagaaatggatttattttaaaatttggaattgtcgtatatattttatatgtaagatagtatataagtagaaatatttaaaagtagttttatttatagattgtagtaattttgtatttttattaagataatttgttttgtgttaaaatagtaatttttaaatttttgtttattatgaaaaggtaattttaaagtttattatgtaaaattaattataaataggatttaatttatatttatagatttttttaagtattatataatttaaaaatttttgttttaaagttttgttttaattattgaaatattttaatttgtggttattaatttagtaaatttaaggaattaggttatgattaagaatttaggtggaattgatgtttgggtaattaaaataaatggtataagagtttaaaaattaaagttgtgttagtggtttttaattagaggtagtaatttgttattttagaggatgttgagaaatgtgtaggggtatttttttggttgttatatttattaggggtttttgttggtatttaagtttaaagatatttatttttgtagtgtatgggatagtttggtataatgaagaattagtttttttaaaatgtagattattttattttaagggatagggtagattattattagaagtaaaattaaaagtataagttgggtaaattgatagaatattagataggagagattaattttaattttttaaatttggttagtaaagtgtaataaaggtattgataagttttgttagtttattatagtatttgtaaattaggaattaataattgaattagatttaagggttttgttttgttatatatatttaaggtagaaaaaaagttatatgtcgattaggtatttattaagaatggttaagttgagattttggttaatagagtaagtttatatatttagagaaataatatagtggaaaatcgaaaaaaaaaaatagaaaaatttatcggtaattttttaatagttttgaatatttatagtagagttttattatttgagagaaagattggaagatttgaaagttatttttgttttttaattttagttttttaaatattgaaattttgtatattttgtgaaattttagtatgttttgtttaaggtgttaataaaattagtttgtattatgtagttattgagtgagggggagatataagttaaggattttaaattgatttttagttatagagaatttgttataagttagttttgtttgtaaaaaaaaaaaaaaaaaaagaaaaagaaaaaagtgtattttattgttttttgtattaagtaattttgtaattgtatggtagtttttttttttttaaataaatatagttgttattggttttgttgtagtagtgaatatagttaaaatacgtatattaaaaaaaaaattattaggtttttattagttattgttttatagtttatttttattagtttttttgatagatttgtatttttagtgtttcgtattgttatttaaattgttttattatgttaagtttttgttaatagttttattttttttgaaatatttgaatatttgatgattttagttttgaggagatattatttttaggtgtgtttttttagtttttgtaggtattttttttttttaatatttgtttttcgtatttttaaaaaaatttgttttagattgttttgttttgtgttagttcgttagttgattttatttttttttatgg

SEQ ID NO: 59 - DNA, 1092 bp, Artificial Sequence
  chemically treated genomic DNA (Homo sapiens)
aagttttttttttattatttaagaaggtatttaggtttttttgtgttaggttttaggtaaagtgttggattatttagtaattgggtttagtagtaggatggttttagattgaggttttagggttaaaggattatttttttttttagcgttggttcgggaaaggtaagtttcgggcgggagcgtacgtcgcgttttcgaagtttggttttttcgttacgtttattttttgtttttatttcgcgtttttttaggttttttttcggtgaatcggatgttttgttagttttttattttgcgttttcggtcgcggttcgggtttttcgtaaagtcgttgttatttcggagggtttagttagcgggttttcggaggttggtcgggtaggcgtggtgcgcggtaggagttgggcgcgtacggttatcgcgcgtggaggagatattgttttgtcgcgatgggggttcggggcgtttttttacgtcgtaggtaagcggggcggcggttgcggtatttgtttatcgggagttttttttttttttttttgttgttgttgttttgtatttagttcgggggaggatagaagaaaaaggaggtagaatggatttttttggtttttttttgtggtcgggggcgggttagggtgggtcgcgttgtttaggtagttttgtcgtgttgttaggtagtttggtcgtcggcgtgggcgatgtcggcgttggggcgggagtcgcgagggtgggaggttttggggcgttttcgggacgtggagttagtagggttttgatttgaaaaacgacggtaaagcgtgtttttgattgtttttgagtattttatattttttagatttagggcgtttttatttttagttggaagtttagtttagagtaatggtgttattaaaaggggtgtgttggatgtgaaaatattttttggaagtatttataagtttgtaggaaatatgttttttttatttttttattttgttttttttattatttattttaagaagtaatagaatttgtgtagagtgtgttttaagttatattgtatgtttatttttgtttatgttgaattcggtgtatatttgtgagaataagttt

SEQ ID NO: 60 - DNA, 1092 bp, Artificial Sequence
  chemically treated genomic DNA (Homo sapiens)
aagtttatttttataagtatatatcgagtttaatataaataaaaataaatatatagtgtaatttaaaatatattttgtataggttttgttgttttttgaaatgggtaatgaagggagtagagtaagaaaataaggaaaatatattttttgtaggtttataaatatttttaaagggtatttttatatttaatatattttttttagtggtattattgttttaagttgggtttttagttgggaataaaggcgttttgggtttgaaaggtgtgaggtgtttagaagtagttaagaatacgttttgtcgtcgttttttaagttagaattttgttaattttacgtttcggaaacgttttagggttttttattttcgcggttttcgttttagcgtcggtatcgtttacgtcggcgattaggttgtttagtaatacggtagggttgtttgggtaacgcggtttattttggttcgttttcgattataggggaaggttaaggggatttattttatttttttttttttttgttttttttcgagttggatgtagagtagtagtagtaggagaaggaagggaaagttttcggtgggtaggtatcgtagtcgtcgtttcgtttgtttacggcgtgaaggagcgtttcgggtttttatcgcggtagggtagtgttttttttacgcgcggtagtcgtgcgcgtttagtttttatcgcgtattacgtttgttcggttagttttcgggagttcgttggttgggtttttcgggatggtagcggttttgcgagggattcgggtcgcggtcgaggacgtagagtaggagattgatagagtattcggtttatcgggagaagatttggaaaggcgcgggatgggggtaggaagtgggcgtggcgagggagttaggtttcgggggcgcggcgtgcgttttcgttcggagtttgtttttttcggattagcgttgaggagaggagtggttttttggttttgggattttaatttgaggttattttgttattgaatttaattattgggtagtttagtattttatttggggtttagtatagaaagatttgaatgtttttttggatgatgaaggggaagttt

SEQ ID NO: 61 - DNA, 6271 bp, Artificial Sequence
  chemically treated genomic DNA (Homo sapiens)
  unsure (4779)
agtggtataaatatggtttattgtagtttttattttttgggattaagtaattttttagttttagttttttgagtagttgagatgatagttgtttatcgttatgtttagtaaatttttttattttttgtaaagatacgattttattatgttggttaggttggttttgaatttttgggtttacgcgatttatttgttttagtttttaaagtgttgggattataggtttgagttatggtgttcggttatatttatggatttaattgtttttggaattaatatcgtgtaggaaaggagtaggattgagtagaaaaagttgaattaaatgtagttatagtaaatgttttagttttcggattttaagggagttttggtgttaggagagttttttagagtagttttattttgagttttgtatttgttagttagtgtagacggatttggtgagaggtagttttttttagttgaaggtaatttttggaaagggatttagttgataggtgttgataagtaatgcgtttagtagttgaggaaatgagtattttagttttgaagagtggtgtgttttttggtatgttgggatggttggttgtgttagtggagatgggggtggtgggtagaatgaagggaatattattgtaaaagttttttattttttatttatatttatttatttatttattttttaagataaggtttaattttgatgttcgggttggagtgttggaatgtaatgatattattatagtttattgtagttttgattttttgggtttaagcgatttttttattttagttttttaagtaattggaattataggtatatgttattatgtttagttaattaaaaaaaaaaattttgtagagatgaggtttcgttatgttgtttagggtggtttggaatttttgggtttaagtgatttatttattttggttttttaaagtgttgggatgataggtatgagttacggtttttagtttggaataaaatttttcgaagaaaaaattggtagagtttgttgtttgattaaaaaatagaggttgaatgagagagatgtatttaaaataatacgaaatattaagggttttttgaatattgttggatagtgtaaaatgggggaagttaggatataaatttaattttgttttattgtaaggtttatgtttttttattagattagtgttggttaaattggtgttttatgggttatatttagatagtagacgtattttgtttggttatatagtatttaaaaaatgtaaattggttgttattatgtaaaaattggaagagtttatatgtaagtttagatttttagttttttttgagtaattagaagatttagtaatattgggttaatatttttgtatggtagtaattggagttgagtgatagatattttttaaatggagagagtattttttatttggataaatggaggtgggtatatgttttttaatttattatagtttttatgtattattttttttggtattttttttttgagatggagttattttgtcgtttaggttggattgtagtagtataatttaggtttattgaaattttagttttttgggtttaagtaatttttttgttttagttattttagtaagtagttgggattatagttatgtgttattatgttcggttttttttttttttttttttttttttagtagagatggagttttattatattggttaggttggttttaaatttttgattttaggtgatttgtttgtttcggttttttaaagtgttgggattataggtatgagttatagcgtttagttttttttggtatttttgtttagtatttttgttatatgtattatgtatggtttaataaagtatataatatataataggtatttgggtatttttatttttatttattttttagagatagggttttgttttgttgtttaggttggagtgtagtggcgagattatagtttattgtagttttgatttttttagtttaagtgatttttttattttagttttttaagttgttgggattatagatgtatattattatgtttaattaatttaaataattttttttggtagaagttgggattttattatgttgtttaggttggtttgaatttttaggtttaagtaatttttttatttcggtttttaaaagtgttggtattataggtgtgagttattacgatcggtttatttggatatttaatattggtttagtagaattgaatgaatttaattggagaggaagttggggtgaagtttaggtttttgattataatgagaggtttggtattgaggggaggtaatagaatagggagtataaattaggatgaattaatgatatgttggtaggagtttgagtaaaggaagaagagtagagggttagggtttgaagtttgggtgttttattatagagttaaagaagagtgggtaatggtagattaaattagagaagaagaggagagaaaggtatagaggaattttagtaacggaatgttagggaaggtaagggagttgagggtttgggtagttgtatttagtgtagggaagaagattagggagatagataggtaaaaagttatggtaataaggaagtagttagggatttttagaggaagtatgagaaaaggagaggaaggttataggtttgaagtttagtagtgtagtagggggtattggaatattattttgggggtatgagtgagtgtttttttaggggttttatttgggagaaatatagatagatatttatttaatatttatttatttttttttagtatagttattattttgatattatttaaaagaaattagtatttgtattgtatttttaaagaagaagggataaaagatatgtttaaattgtttgtttgttttagtggaataaaatattaatttaatatgtattttggataattattaatttagagattggaaattttttttaaggatatatttttttgtatgtgggttattggttttgtggtttttttgtaggaaaattaaaattttagttttgtttttttttattatttagtgtttgtgtggtttaattggttgattagcgcgtgtttggaatgtgtaaatttattttaatattggtttaggggtttgtgtggtagtttatttttgttattttagtattttgggaggttaaggtagggggattatttgaggttaggagttttagattagtttgggtaatatagtaagattgtgtttttattaaaaaaaaaaaaaaaaaaaaaattagttaaagtagggtgatatttatttgtagttttagttatttaggagtttgaggtgggaggattatttcggtttaggagtttgaggttggagtgagttatgattgagttattgtattttattgtatagagttagattttgtttttgaaaaataaaaatatttgtttaggtaaaatgtatcgaggaagataaattttaaaattatttattttaggttaggtgcggtggtttatatttgtaattttagtattttgggaggttgaggtgggcggattatgaggttaggagtttaagattagtttggttaatatggtgaaatatcgtttttattaaaaatataaaaattagtcggttgtggtggcgtatgtttgtagttttagttattcgggaggttgaggtagaagaattattttaatcgggaggcggaggttgtagtgagtcgagatcgcgtttttgtattttagtttgggtgatagggtgagattttgttttaaaaaaaaaaaaaaaaaaattagttattttaaagtttaatgttagatatagattattcgttgttttggatgtaattttttttttggaaaattggtataatttaattatatatgaaatttttttaattttggtattggaggtatagggaaggattttgttttaggagatttatagtttatttttattgttttaggagttaaattacgttggtttatattttgattttgttatttgttaatttagattttgggtaaattaaaggtttgagggaggagtgtaggtttttagcgtttttacgggggtggggacgtgacgtatttattagtttatgaagttaatgatatgtattgaaaaggtttgtttaaggatttaaataagacgatgaatatattgaattaataatgaatgtaaggttttaaaggtgttttgagggtggtgaaatttgaattttttattaattgtgtaatagttatattaatttggatggttatgagttttgtagaggaaagttgggtttaaattttaatgttagatttggtggttagattttgattgttatcgggtttagtattgggatttaagcgatttttaaaaaaaaaaaattacggaatttttttttggttttttttttttgttttttagtagtttattaagttacgaagaatttgaaaatcggaggtcgtgtattttattttttttgagagtttaagttgagagtatagtttttttaggagattagcggtagagattcgcgcgttgggagaaaggttagttttagggcgttttaatttttaatttcgggagtaatttaaattcggaggtcggcgggggaggggatagttgtagggggcggtggggatgggagtggatgttttcgggttagttttggtattcgttagttgagtttagcgttagtttaggtgagttttacggcggtgagggacgttcgttagacggtttagaggagttagatgacgttatttttaggaggattcgtttttttattaatgaaatcggtcggcgcgggcgtatgcgcggnaggtcgttttttttttcgtttttttttttttttttttagtcgcgtttttaatttttagttcgttcgcgtttttttttttcgggtcgtggaaaggattttattttcggtggggtgttatggcggcgtttcggattgtgatggttgtggggagacggcgttagtggggagagcgattaagaggttttttttttttttcgggttttttttttttatttttttttttttagtttttttgttaacgttttttttttttttttttttttcgttcggcgttgattttttatttttattttcgtgggaatattgggagtttgtattttatagattttttttttgtttttttttttattttagttttcgtttttcgtttttttttcggtttagggcgtcggtttattttttttttcgtcgtttttcggtcgcggggaggatatggtcgcgtataggtcggtggaatgggtttaggtcgtggttagtcgtttcgacgagtaggtaatcggttcgtggcgggcgggaggtgggagcggagtgggggtggggatagagtaggtgaggggaggtaggagcggtcgtttttttcgcggttgttttaggttttggaggaaaggaagggaagggaagagaagggaaggggggataagtgggggtggttaaggcgggaggtgaggggtaggaggggatagttgggagtttgggtatttttttttttttaagtcggggggtggggttttgtttttgattagttttcgattttttattttttttattttagttttttcgtttggaaatggggatgagtgatttgggggcgtttttaggggcgcgttatttggatttaataattatttttttatttttgtttttgagtagaggtgggtaacgtttaggggttttttttttttttttttttcgtgatttttttaattggggacgagcgaattttaaggtttgttttatatattttttataggagaacgataatatttcgttttttttttagtttttttagtttttttttttggagggggaagagtagaagaaagtaaggaaggtataggtttttttattttttgttttatcgttttattttgtttcgagagttttaagtgtatatttattgtatatttttgtgatgttttataacgtcgttttttatattttgatgatatagattgttttttttttttattgtcgtttgtagtggaaatcgtggttttgaaatattttttttttttttgataattgtagttttttttttttttttttttttttttgttagcggtttgaggatgtgatgtattttcgagtgagaatgttggggagtaaaggggagaagggtgaaaggaaagtgagaaattgttttagagttatcgataatagagtaaagttagttgggatgtggttttggagcggattattttgttagtgtttgtggttgtttttgatttttttttggttgataagagaatttttattgagaatatttgggatg

SEQ ID NO: 62 - DNA, 6271 bp, Artificial Sequence
  chemically treated genomic DNA (Homo sapiens)
  unsure (1493)
tattttaaatatttttaatgaaagtttttttgttaattaggagagagttaaaaataattataaatattagtagaatgattcgttttaggattatattttagttggttttgttttgttgtcggtggttttgaagtagttttttattttttttttattttttttttttttattttttaatatttttattcgagaatgtattatatttttagatcgttggtaaaaaaaaaaggggggggggaagagattgtaattattaaggaaggggaaggtattttagaattacggtttttattgtaaacggtaataaaaaaaaaaggtagtttgtgttattaggatatgggggacgacgttgtagggtattataaagatgtgtagtgagtgtgtatttgaagttttcggggtaggatgagacgatggagtagaaagtaagaaaatttgtgttttttttgtttttttttgtttttttttttttaggagaggaagttgaagaaattgggggaggggcggaatgttatcgtttttttatagagggtatataagataggttttagggttcgttcgtttttagttaggagggttacggagggaagaggaagagagaatttttaaacgttatttatttttgtttaaaaataaaagtaagggggtaattattaaatttagatggcgcgtttttaaaggcgtttttaggttatttatttttatttttaagcggaagggttgggataaaggggatggagggtcggaggttggttagggataaggttttatttttcgatttaggagggaaagggtgtttaagtttttagttgtttttttttattttttatttttcgttttggttatttttatttatttttttttttttttttttttttttttttttttttttttagagtttgaggtagtcgcgggggaggcggtcgtttttatttttttttatttattttgtttttatttttatttcgtttttatttttcgttcgttacgggtcggttatttgttcgtcgaagcggttgattacggtttggatttattttatcggtttgtgcgcggttatgtttttttcgcggtcggggggcggcggagggaagggtgggtcggcgttttgggtcgggaagagggcggggagcggaggttgaggtgagggaagaggtaaggagagggtttgtggagtgtaggtttttagtgtttttacgggggtggggatggggggttagcgtcgagcgggagggggagagggaaagggggcgttggtaaggaggttggggggagggggataggggaaggggattcggggaggggagggggttttttggtcgttttttttattagcgtcgtttttttatagttattatagttcgagacgtcgttatgatattttatcggaagtgggattttttttacggttcggggagagggagcgcgagcgagttagagattgagagcgcggttgggaaaggggagggggaagcgagagggaaggcggtttntcgcgtatgcgttcgcgtcggtcggttttattaatgaaaaagcgagtttttttggaggtgacgttatttaatttttttgggtcgtttggcgagcgttttttatcgtcgtggggtttatttagattggcgttgggtttagttggcgagtgttagagttgattcgggagtatttatttttatttttatcgttttttatagttgttttttttttcgtcggttttcgggtttggattgttttcggagttggaagttagggcgttttggggttagttttttttttagcgcgcggatttttgtcgttaattttttggggaggttgtgtttttagtttaagtttttagaaaaaataaggtatacgattttcgatttttaggtttttcgtagtttggtagattgttgagaaataaaaaaggaaggttaaagagagatttcgtgattttttttttttagaggtcgtttaaattttaatgttagattcggtggtaattaaggtttagttattaggtttagtattgggatttaagtttagtttttttttgtaaaatttatagttatttaagttaatataattattgtatagttgatgagagatttaagttttattatttttaaaatatttttaaggttttgtatttattattaatttaatatatttatcgttttatttaaatttttgaataaatttttttaatatatattattaattttatgaattgatgaatacgttacgtttttattttcgtgggaacgttgggagtttgtattttttttttagatttttgatttgtttaaggtttgagttgataggtggtaaagttaggatgtaaattaacgtggtttaatttttagaataatagaggtagattatgggttttttaaaataaagtttttttttatatttttaatattagagttgaaaggattttatgtgtaattgggttgtgttagttttttaggaagaggattatatttaaaataacggataatttatgtttgatattggattttggaatgattaatttttttttttttttttttaagatagagttttattttgttatttaggttggagtgtagaggcgcgatttcggtttattgtaattttcgtttttcggttgaagtgatttttttgttttagtttttcgagtagttgggattataggtatgcgttattatagtcggttaatttttgtatttttagtagagacggtgttttattatattggttaggttggttttgaatttttgattttatgattcgtttattttagttttttaaagtattgggattataggtgtgagttatcgtatttggtttggaatgagtaattttaaaatttgtttttttcgatatattttatttaggtaaatgtttttgttttttagagataaggtttgattttgtgtagtggagtgtagtggtttaattatagtttattttagttttagatttttgggtcgaagtgatttttttattttaagtttttgaatagttgggattataggtgagtgttattttgttttggttaattttttttttttttttttttttggtagagatatagttttgttatgttgtttaggttggtttggaatttttggttttaagtgatttttttgttttggttttttaaagtgttgggatgataggggtgagttattatataggtttttaggttaatgttaaaatgaatttatatattttaagtacgcgttaattagttagttaagttatatagatattgggtgataagggagaataaaattagaattttaatttttttatagaaaagttataaagttagtagtttatatatagagagatatatttttgagaaaagtttttaatttttaggttggtggttgtttaaaatatatattaaattaatgttttattttattagaatagatagatagtttggatatgttttttgtttttttttttttaaggatgtaatgtagatattaattttttttagatgatgttagaatgatgattatgttggaaagaaatggatgaatattaaatgaatgtttatttatgttttttttaagtaggatttttgaaaaagtatttatttatatttttaagatagtattttagtgttttttattgtattgttaaattttagatttatgattttttttttttttttttatattttttttgaaagtttttaattatttttttgttgttatggttttttgtttgtttatttttttgatttttttttttatattggatgtaattgtttaaatttttagtttttttgttttttttggtatttcgttgttgaagtttttttgtgttttttttttttttttttttttagtttagtttattattgtttatttttttttagttttgtggtaagatatttaaattttaggttttggttttttgtttttttttttttatttaagtttttgttagtatgttattaatttattttaatttgtattttttgttttgttgtttttttttagtgttaaattttttattatagttagaggtttagattttattttaattttttttttaattaaatttatttagttttgttgaattagtattaagtgtttaaatgggtcggtcgtggtggtttatatttataatgttagtatttttagaggtcgaggtgggaggattgtttgagtttagaagtttagattagtttgggtaatatagtgagattttagtttttattaaaaaaaattatttaaattagttaggtatagtggtgtgtatttgtggttttagtaatttgggaggttgaggtgggaggattatttgagttagagaggttaaggttgtagtgagttgtgatttcgttattgtattttagtttaggtaatagagtaagattttgtttttaaaaaataaataaaaataaaagtatttaaatgtttgttatgtattatgtattttgttagattatatatagtatatatggtaggaatgttaaataaaagtgttaaagaagattggacgttgtggtttatgtttgtaattttagtattttgggaggtcgaggtaggtagattatttgaggttaggagtttgagattagtttggttaatgtggtgaaattttatttttattaaaaaaaaaaaaaaaaaaaaaaaaagtcgggtatggtggtatatggttgtaattttaattatttattagggtgattgaggtaggagaattgtttgaatttaggaggttgaggttttagtgagtttagattgtgttgttgtaatttagtttgggcgatagagtgattttattttaaaaaaaaaatgttaaagaaggtaatgtatagagattgtggtgaattaagaagtatatatttatttttatttatttagataagagatattttttttatttaaagagtatttgttatttaattttagttattgttatgtaggaatgttgatttagtgttgttagattttttagttatttaagagaagttagagatttgaatttatatgtaaatttttttaatttttatatagtggtagttaatttatattttttaaatgttgtgtagttaaataaaatacgtttgttgtttgaatgtagtttatggaatattagtttgattagtattagtttagtgaaaaggtatgagttttatagtagaatagaattagatttgtattttaattttttttattttgtattgtttaatagtatttagggaatttttagtgtttcgtattgttttaaatgtattttttttatttagtttttgttttttggttaggtaataagttttgttaatttttttttcgaagagttttgttttaagttgggagtcgtggtttatgtttgttattttagtattttgggaggttaaggtgggtggattatttgagtttaggagttttagattattttgggtaatatggcgaaattttatttttataaaatttttttttttaattagttgggtatggtggtatgtgtttgtggttttagttatttgggaagttgaagtgggaggatcgtttgagtttaggaggttaaggttatagtgagttgtgatggtgttattgtattttagtattttagttcgggtattagagttagattttgttttaaaaaataaataaatgaataaatataaataaaaaataaaaagtttttatagtagtattttttttattttgtttattatttttatttttattggtataattaattattttagtatattaaagagtatattattttttaggattaaggtgtttatttttttagttgttgggcgtattatttgttaatatttattagttaaatttttttttaggagttgtttttagttgaagaaagttgttttttattaggttcgtttgtattgattggtagatgtagggtttagggtggggttgttttgaagggtttttttggtattagagtttttttaggattcggaagttgaggtatttgttgtaattatatttagtttaattttttttgtttaattttattttttttttgtacggtgttgattttaagggtaattaaatttatgagtgtggtcggatattatggtttagatttgtaattttagtattttaggagttgaggtaggtggatcgcgtgagtttaagagtttaagattagtttgattaatatggtaaaatcgtatttttataaaaaataaaaaaatttgttggatatggcggtgagtagttgttattttagttatttaggaggttgaagttggaggattgtttgattttaggaggtagaggttgtagtgagttatgtttgtattatt

SEQ ID NO: 63 - DNA, 4501 bp, Artificial Sequence
  chemically treated genomic DNA (Homo sapiens)
atatatttgtaagaaaagttagattagagtgaagtaaagttaggatttgatggtggcgggaagggaaggggttaatgttgttgttggatagaggggtgttattttttttagaagaatagtatgtcgtggttattattataataatagttgatataattattatgggttggggatttataagagtttttataatttttaggtaggaggtattacgaattttattttataattgaggaaattgaggtataaagaaacgaagtagtgatagtagtttttttttttttttttaatagtttggaattaagttgtttgagtcgaggttgggttttaggaggtgtggatagtatttttatttcggtaaattagattcgtttgtttataattggggagaatggtggttttgaaaaggttaatttgggagttttggggacggttgtagggaacgtacgtttattttttttaggaagtagagttaggtcgttttttttttcgtagtggtgaggacgcgtggatagtttcgcgggggcggcgggagatttgcggagtggtcgtattttaggttcgcgttaaggtcgggtagtttcgttttttgtttagttttcgcgaggtgtcgttttcggtcgaagaaattatcgcggcgttattttcgtagttcgtatttatttatttatttatttttaaataaggggggcgtttttttttttttaatttgaaattggaaatatttagaggttttgtttttaagggggcgcgttttttttttgttattttgtattttcggattagttttttttcgtaattatataggagtaatttttttgtaaggttttgtttaacgttggtttcgcgtttagttgtataatacgtagttaaagcgggggttgggttagaagtatcggttttttttttttaatatatattttcggagtttttcgtaattttttttttttttaatgataagtaattgttaggttcgtagggtgggtgttgtattgtatcgtttcgcgcgtagttggtttttagagtgtagtcggtgtaagttcgggggtttaaaagggcgggaggagtatattttgggttttttagttttgtagttttttttttgtaaagaaaagtaagtggtttttggcgcgaaagttttggcgttttttttgatttttatggaaattaggagggcggggtaaagtcgtttttttttttttttttttttttttttgtttgcgttatagttttttttttttttcgtttttcgggtgtgttagattttttagttaataatatttttcgagttttaaagcgtaggttgtgatagttatttgtttggacgcgttgggtggatgcggggggtttttgggaattgtgttggagtcgagtaagcgttagttaggcgtaagcgcgtatagattgtagttattcgaggatattttcgttttttcggtttattcggagatattcgcgtagaatcgttttcggattttttgtagtcggcgggaggtaaggagtagggtttgtaaatcgttcggcgtttagggaagcgacgagcgtcggggtaaggtaagttttggacgggattgcgacgtgcgtatcgggcgttttaatatgttcgggggattgtttttgttttcgaaataaaattatttttgggtttttttagaaaagttagttttagtttcgaaggtattttggttagaggagattcgttttaatttttttgtagtttttatcggggggagtaatggtttttgcgaaaagaaattttttcggttttagaagatttgtttgtgtttgagttgtcggagagtcggtgcgtttttattttaggttggggtttttttttaaagggtgtttttggaggaagaagagggggggattaggtagggcgaggtcgtcgcggtcgtaatttgggttacggttgttttagtttggaggagaggcggttttttcggcgatttttttcgcgcgggcgtttttgttattttcgggaataggggtttagtttttttttttttggaagaggacgttgtcgtgggtttggaagagtaggggtgggtttagagagtttttaattaagttattggtaggagtatttttgtagcgggtgaatgtcgaggggcgtttgtttaaatttggggaggggaaggatttgtggatatgggtgtttgttgttggtttttgtttagagaaaggtttttttttatttgtaaagttttttaaattttttgttattatttgtatttttgaggttgtatttttataaagggggtagaaggtattttaaatattattttcggtagttgggtcggagagtttggggttttttttgagtagtcggttttatatcgttgcgagtgcggttgtttgcgtgttcgtgagagttagaattttgtagttaggaatagtttttttttttaggtagtgttttgtgtgaatgaaatggtagtttttaaagttgcggagtttcgttattattttttgtatttgtatgtttttttttattttttgtcgtagatagtttgtatataaaaggagggcgggagggagggagcgagaggtataattttttttattttcgggagtagtgggtagagtggggggtttggagggaagattggggaatttggttagagggggcgtttattgtttattttttcggtttgtttcgtttgtttatttttttcggtgtgtttgtcggttgtagtgttggaggtcggcgtcggttttcgtttttcgcgttttttacgggaaggaagtattttcggtattaaaacgaacggggcggaaagaagtttttagtcgtcggtcgggaggcgagtcgatgtcgagttgttttacgtttattatgtcgggtatgatttgtaagaatttagatttcgagtttgattcgttatagttttgtttttattcggacgaagatgatttttatttcggcggtttcgattcgattttttcgggggaggatatttggaagaagtttgagttgttgtttacgttttcgttgtcgtttagtcgtggtttcgcggagtatagtttcgagttttcgagttgggttacggagatgttgtttgagaacgagttgtggggtagttcggtcgaggaggacgcgttcggtttggggggattgggtggttttatttttaattcggttattttttaggattgtatgtggagcggttttttcgttcgcgagaagttggagcgcgtcgtgagcgagaagttgtagtacggtcgcgggtcgttaatcgtcggttttatcgtttagttttcgggagtcggcgtcgttagttttgcgggtcgcgggtacggcggggttgcgggagtcggtcgcgtcggggtcgttttgttcgtcgagttcgtttattcggtcgtcgagtgcgtggatttcgtcgtggtttttttttttttcgtgaataagcgcgagttagcgttcgtgttcgtagtttcggttagtgtttcggcggcgggttttgcggtcgtttcgggggcgggtattgtcgttttagtcggggtttcgggggtcgttttttcgcgtttaggcggtcgttagattagcggcggcgattataaggtttttagtattttcggagaggatattttgagcgatttaggtaaagatcgaattcgggttcggttgtttttttggggtattggatttcgggtcgcgttttttttgttagtgttcgtatgttttggtttggggagtattttggaggtagtgttaggggtagagaggttttgttttttttaagttttttttcggggtaaagagaaggggttgagagaatgtcgttgtaaaaggggtgttttttaattttcgtttttattaaagttttttttatttttttttggggagtttttttttaggttattacgggtttttattcggttttttattttttttttgtagcgtagtttgaggaataaaattggagaaagttggtggttaaatcgggtgggggtttagggggttgttgggtgtattgtttggatagaaatttgttagcgtaggggtgaaagggattttttggtttaggttaggggagggaaagatattttcgagaagatttaagggttgtgtaaagttttgtttaaggcgtaggaatttataggagggttgtaatagatggttagagtcgattttttattttttttttttttttttttttttttttaaatgtcggtatttttttttttttttattttcggtgggtggtgggttatttgtttttggtgcgtggttagtaggcggcgatatgcgaggttagtaggcgggttcgggatttgaaaggttgggggtggtgggggtattttttttttttttatttagtagttggttgtaagtgtaatagtagttgtgtatatttttagggggttttttttttttagtgtgtagtggaaagtggttgtagttttgttttttagtttgaattttaggtttaatttgagatgtgagttgtatttgtaatttagtgtttttgaaggtgagggtaggtatttagtagtt

SEQ ID NO: 64 - DNA, 4501 bp, Artificial Sequence
  chemically treated genomic DNA (Homo sapiens)
ggttgttgagtgtttgtttttatttttaagggtattgggttatagatataatttatattttaaattaggtttggaatttaggttggaagataaaattatagttattttttattgtatattggaaagaggaggttttttgagaatgtatataattgttgttgtatttgtagttagttgttgaatggagggagggagggtgtttttattatttttagttttttagatttcgggttcgtttgttggtttcgtatatcgtcgtttgttggttacgtattaggagtaaatagtttattatttatcgaggatgggggaagggaaaggtatcgatatttgaaaaaaaaaaaaaaaaaagaaaaagaatagaaaatcggttttagttatttgttgtaatttttttataagtttttgcgttttaaatagggttttgtatagtttttgaattttttcggggatgttttttttttttttgatttgggttagagagttttttttatttttgcgttaataggtttttgtttaggtagtgtatttagtaattttttaaatttttattcggtttagttattaattttttttaattttattttttagattgcgttgtaaaagagaggtgggggatcgggtgagggttcgtgatggtttagaggagggttttttaggagagggtggaaggaattttagtgaaggcgagaattggagagtattttttttgtaacggtatttttttagttttttttttttatttcgaggagagatttgggggaaataggatttttttgtttttagtattgtttttaaaatgttttttaggttaagatatacgagtattaataaaggggacgcgattcggggtttagtgttttagggaggtagtcggattcgagttcggtttttatttgaatcgtttagggtgtttttttcggaggtattgagggttttgtggtcgtcgtcgttggtttggcggtcgtttgggcgcggaggggcgattttcggggtttcggttggggcggtaatattcgttttcgaggcgatcgtagggttcgtcgtcggggtattggtcggggttgcgggtacgggcgttggttcgcgtttgtttacgggaaaggggaagattacggcgggatttacgtattcggcggtcgggtgggcgagttcggcgggtagggcggtttcggcgcggtcggttttcgtagtttcgtcgtgttcgcgattcgtagggttggcggcgtcggttttcggggattgggcggtggaatcggcggttggcggttcgcggtcgtgttgtagtttttcgtttacggcgcgttttagtttttcgcgggcggagaagtcgttttatatgtagttttggaggatgatcgggttgggggtgaggttatttagtttttttaggtcgaacgcgtttttttcggtcgggttgttttatagttcgtttttaagtagtattttcgtgatttagttcgggggttcggagttgtgtttcgcgaagttacggttgggcgatagcgggggcgtgggtagtagtttaaattttttttagatgttttttttcgggggggtcgagtcggggtcgtcgaagtagaagttattttcgttcgggtagaagtagggttgtagcgagttaaattcgaggtttgggtttttgtagattatgttcggtatggtggacgtggagtagttcggtatcggttcgtttttcggtcggcgattgagggttttttttcgtttcgttcgttttaatatcgggggtgtttttttttcgtggggggcgcggaaggcgggggtcggcgtcgatttttaatattgtaatcgatagatatatcggagagggtgggtaaacggggtagatcgaggggataggtaatgggcgttttttttaattaggttttttaattttttttttaagttttttattttgtttattgttttcgaaggtggaggaagttgtgtttttcgttttttttttttcgttttttttttgtgtataagttgtttacgatagggggtgggagggggtatgtagatgtagggggtggtggcgaggtttcgtaattttggaaattgttattttatttatataaggtattgtttgggggagggggttgtttttggttgtagaattttagtttttacgagtacgtagataatcgtattcgtagcggtgtggggtcggttgtttaggggaagttttaggtttttcgatttagttatcgggaatggtatttggagtattttttattttttttgtaaaaatgtaattttaggagtgtaaatgatagtaggggatttagaaaattttgtaaataaaaaaaagtttttttttagatagagattaataatagatatttatatttataaattttttttttttttaaatttgagtaaacgtttttcggtatttattcgttgtagggatatttttgttaatagtttaattggaagttttttaagtttatttttgtttttttaaatttacgataacgtttttttttagggagggagaggttgagtttttgttttcgggaatggtaggggcgttcgcgcgaggagggtcgtcgggagagtcgttttttttttaagttggagtagtcgtgatttagattgcgatcgcggcggtttcgttttgtttaattttttttttttttttttttaggggtattttttggagaagaattttagtttggggtggggacgtatcggtttttcgatagtttaaatatagatagattttttagagtcgagggaattttttttcgtagaagttattatttttttcggtaagggttgtaaaaggattagggcgggttttttttagttaggatgttttcggggttggaattggtttttttgggaaaatttagagatggttttgtttcggaagtagaaatagtttttcgggtatattagggcgttcggtgcgtacgtcgtaatttcgtttagggtttgttttgtttcggcgttcgtcgtttttttgggcgtcgggcggtttgtaagttttgttttttatttttcgtcgattgtaggggattcggaggcgattttgcgcgggtgttttcgggtgggtcgggggggcgggggtgttttcggatggttatagtttgtgcgcgtttgcgtttggttagcgtttgttcggttttaatatagtttttaggagtttttcgtatttatttagcgcgtttagatagatgattgttatagtttgcgttttgaagttcgggggatattattaattgaaaaatttgatatattcggggggcggggagagaagggggttgtggcgtagataagggggagggagaaaggagaggaaagcggttttatttcgtttttttgatttttataaaaattaggggaggcgttaaggttttcgcgttaaaagttatttgtttttttttgtagagagaaggttgtaaagttgggaagtttagggtgtgtttttttcgtttttttggattttcgggtttgtatcggttgtattttgagaattagttgcgcgcggagcggtgtaatgtagtatttattttgcgagtttggtaattgtttgttattaaaagaaaaaaaaattacggagggtttcgggggtgtgtgttggggaggggagatcgatgtttttaatttagttttcgttttgattgcgtgttgtgtagttgagcgcgaggttaacgttgagtaaggttttgtagggaggttgtttttgtgtaattacgaaagaaggttagttcgaaggtgtaaaatagtagggagaggacgcgtttttttaggaataagatttttggatgtttttagttttaaattgaaagaagaggggcgttttttttgtttgaaaataaataaataaataagtgcgagttacgagggtggcgtcgcggtggttttttcggtcgaaggcgatatttcgcggagattgagtagaaagcggagttgttcggttttggcgcggatttggagtgcggttatttcgtaggtttttcgtcgttttcgcgggattgtttacgcgtttttattattgcggaggaggaggcggtttggttttgttttttagggggaatgggcgtacgttttttgtagtcgtttttagggtttttaagttaatttttttaaagttattattttttttagttatgggtaggcgaatttgatttatcgagatggaagtgttgtttatattttttgagatttagtttcggtttaaatagtttgattttaaattgttgaagggaaaaaggaaagttgttgttattatttcgtttttttgtgttttagtttttttaattgtgaaatggagttcgtagtgttttttatttgagagttatgaaagtttttataagtttttagtttataatagttgtgttagttattattatgatgatgattacgatatgttatttttttggggaaaataatatttttttgtttagtagtagtattggtttttttttttttcgttattattaaattttggttttattttattttggtttagttttttttataggtgtat

SEQ ID NO: 65 - DNA, 6112 bp, Artificial Sequence
  chemically treated genomic DNA (Homo sapiens)
atttataggggtagggttgtagggtatttgtaggagttgggagtttgggggatttggtggagttgggagtaattgttgttaattttttttaagagtttgtttttgaaaaaggtaatggaagggaaggaggtattgaaatggtaggtggtaggttaggcgtggtggtttacgtttgtaattttagtattttgggaggttgaggtaggcgaattaggagattaggagatggagattattttggttaatatagtgaaattttgtttttattaaaaatataaaaaattagttaggcgtggtggtgggtgtttggagttttagttattcgggagggaggttgaggtaggggaatcgtttgaatataggaggcggagtttgtagtgagtcgagattacgttattgtattttagtttgggtaatagagtaagattttgttttaaaaataaataaataaaaaatataaaaagtagttgggcgtggtagtaaacgtttgtagttttagttatttaagggattgaggtgggaggattatttgagtttgggatgtcgaggttgtagtgagttgtgttaatattattggattttagtttggttaatagagtgagtttaaaaatatatatttatatttttatatatttatatattaaaaaatataaaaaagtggcgagtgatagttgaggagattattgtagtgggaattttaggagggggtgaggaggggttcgttggtataggggaaggggtgttatagagaaagattttggtttttttggggttttggagtggtagagagagtttaggatgtttgtaaatgtatagaaattagagggtgggaatttttttgggaggtttgtttttttttatgaaggagaagatagagtaattttgttgatagggagggtagagaaggagaggtgaggggtttgagggaagaggtttggtatagaggttggggagagggaaatgagagcgtttaggagtttttggaagatgatttgggttagtagttggggttgttattagggtagttgttgggagggtagggtatttggaggttttaaatttgtattattatagatttttttttagtagggtttaattttttggatggagaggtttgggaggtgtagtagggaagttggggatgacgttgatttggggtttataatatttttttttagtaggtttaggggtttgtagttgttggtaacgggttgattttatttttgggtgaataggtgaagtttttcgggttgtttcgggaagataaaggttgggttttttggtttcggtttttgggattttgagatatagatgttttttttgggaaaggttcgttaatatattaagtaaggtttggtaagggaggaagagtttagggtttttttttgatatttgggggaaagtgttggggaagatttgggtagtatttaaaggttttagtgaatttaaagatagaaggaagatagaaggaggttggattggtaaagggaattttatagtagatattttaggtttttatatttagtagatttggagttttggaagttgaggttgtgaattttttttcggttagttggggtgtttagttttgttttgttcggtttatatggtagggatttattttgtaggttttgtgggttgggtgttggttgggtttggttagttttatttgtaatttagggggaggagtaggggagatataggatgtttttaattttttgattttttgaagtttttttggtattagttcgggtttttattatagtttttagtggaagagtttggaaggggggtagttgttttttgtttagttttttcggttttttagtaattttattttttatgttattacgtttttgcgttaagtttttttttttttaaatatttaatgtgattttttttggttagttggagtttaattgagatatttattttttagaagtttagttttgggaagtggagttaatttttggaagtttgtagattttttttagtgggttgttagattttagtatgagtatgaggtttattatggtttattgggttttaggggttagaagtgtttatgggtgttttaagtgggtgttttattatataggttttatggggggtagttagattatagtagtagatagagttgggtcgggtttatgtaggtttaaagaagtagttagtggttatttaaggtagtggtatttttgtagttttttggttggtgtttgagattagttatattttttataataattagagttatgtttatattttttattattatttagttttttttttgttaaaacgtggagtattgttttttagttttggagtttaggggtagtagataatttgagttagttggagtaggtggggtcgtttttggttggaacggttatggaaaattttaattaaagatagtatttgggagaatatttatgaaaatgtgaaagtttatatttttgatttagttgttttatagatatgatttgtgtaaaataacgtaagtgagaatatttgttatagtagtttgtaatggttaaatatagtaaaaaattttaattatttagtaatggtgattagataaattgtgatttttttatataaggaatgttatgtagttattaaaaagaatgaggtagttttatatgtgttgatgtaggatgagttataagatatatatagttaatataaaagaagagtttagaatagtgtatatgatagcgtttgtattaaatataataaatatatttgtttatttgtacgtacggttgaatttggaaggatatataagagattgttattgttttgagattgggaggtttaggggataggaacgggagggagattttttattgtgtatttgtttgaattttttgaattttgtattatgtgtatattttataatttaataaatatttatgtttttaaaagaaaataaaaaagtatttagaaataaataggttagacgtggtggtttatttttgggaggttgaggagggaggattgatatagttggggatgttaaggttgtagtgagttatgattttgttattgtattttagtttgggtgatagagtgagattttgttttaaaaaaaagaaattgggatgatatagtagtgtttttatttatattttacgtttttattgttagttatgcgatttttggataagttaatttatttttatgttttagtttttgtaaaatagtggtaattttttggaaaggttattttgaagagtaagttaattaatatgtaaagagttggaagagcgtttggtattgaattagtattatgaagtgttagatattgttattttgttgttttagattaattttaaagtaacgttatttgagttatgtcggttttttttgttgttgtttttatttaaatattttatttatttaataaataattttatttttttttttttttttttttttgagatggggtttcgtttttgttttttaggttggagtttaatgacgcgatttcggtttattgtaattttcgttttttgggtttaagcgatttttttattttagtttttcgagtagttgggattttaggcgagcgttattatgttcgttaattattttttgtgtggagatagggtcgtattatattatttaggtcggttttaagtttttggatttaagcgatttttttgtattagttttttaaagtattgggattataggtatgagttatcgtattcggttttaataaatgtttttttttttgagacggagtttcgttttgtcgtttaggttggagtgtagtgggcgatttcggtttattgtaattttcgttttttcggtttatgcgtttcggttttttaaaatgttgggattgcggatttgagttatcgcgttcggtttgaggtgatttttaataagtatagtcgtagttgtagatattttggttttgtaggaataatgaggtatggatggatttatagttggatttatggatgggatggattttcggtaggttttggacggagggaaatgttttggtttgttaagttcggtatcgagtgagatttatttataaagttaatcgtggaagttattggcggtttttttcgttttgtcgtcggggaattttgtcggtggttttcgatttgttttcgggttatttggtgatattgatttcgtagttattattttaattggcgtattcgatttaaataataattagggaatttgtgggcggttaaaggttcggttttgcggtcggtttttttaggtttttttttttgttttgtgaggttagaaagttattttttcgaggtcgttttttatgtcgagaaatatttttcgtttgaggttttgtggggtaggggaggttcgtgtattttttatagaaaatttcgtatagattcgcgattgtttttattaatagtttttaggagattgtttgtagtcggggggttgtcggttttatgttcgcgggtaagtagggataagttgtgtttttaaaagggttaacgggaatttcgcggtttttgaattttcggtgttggcggatttttcgttttagggttattaggagtcgcggcgtgagtgcgtgtcgggatcgagcgcggggtttttgaggaattttaaggttgtttaagtttacggatttagttatattggcgaatcggagatcgttcgattttattattttcgcgttttttttatagtcggcgttaaaaacgttagttttacgacgtaggtcgggattcgcgcgtttacggtttaattagcgcggattttgtataaagcgagtttcgtttttacggcgtcgttgttagtttttttttttttcgtggtcgtttcggttcgtttatttttcgtttcgcgtcgtttacggttagaggttcgcgattggtttatggggacggtcgcgagttttggttggtcggcgcggagttacgagggcgtcgtcgtcgtttttttataggcgattattgggtaggtttagtttttcgttttagtttcgagttttcgttggttttcgggtgtacgtgtttcgggatttttagtattcgcggtcgttatcgtcgtcgtttggttttttttggatttatttgcgttatttgttcgttttatatttcgtcgttattatggtgaagttcgcgaaggtaaacggttttgagcgcgagcgtagacgtgtaggtttgtttttcgaggggcgagcgcggcgtcgcggggaggagggtttgcgcgtagtttcgggcgcgttttagggcgttatgttgcgggaagtttcgcgcgattagtggggaggtttcgcggtttttggttatttggtggcgaggtgaagagtttttgtaggtgttgggggcggcgaacgcggcgggaaagatagagttattgagcgcggggagggggcgttgggtttcggggtggagagatgagattaaatttttgcgacgcgtacgagttgggattcgatttttgacgtacgtgttcgggagcgcggtttgttacgtgggtcgcgtcgcgtgggttttggaatttttagagggatcgggtgttttgggtcgggaaatggcggtatcggttttagtcggagtttcggttgcgttcggatgttttcgtttcggtttggtaagtcgatacgtggtgggtttcggaaggtggttttgtcgcgtgttttttgcgttgtgtttcgggtacgtggtggtttattaggtatttttacgtggtcgcgtcgtttttttaaggggcggggttgtttcgttgggaaaggtataagttttatgagaaaattaaggtagttatttttttaagtgttttaatgatttttatcgttaatttggatttagatgagggtggtagaataaagtatcgggatttgtagtattaaaatacggttgtgtttaattaaggtaacgggaggagaaattatttttttaggttgattttttattttagggtaggttttttgttggtaaagtttgggaggaaaaatgtgggcggttgagagtagttttttttgtattgttattaggagtagtttttatgttagttgtggtgtttggtattatgagaaatggatttgaggacggagatgatggcgtatgaatattaatggtaaaatatggggattttttagtagatt

SEQ ID NO: 66 - DNA, 6112 bp, Artificial Sequence
  chemically treated genomic DNA (Homo sapiens)
ggtttattagaggatttttatattttgttattagtgtttatacgttattattttcgtttttagatttattttttatagtgttaaatattataattaatatagaaattatttttgatggtaatgtaagagggattatttttaatcgtttatatttttttttttaggttttattaatagaaaatttgttttaaggtaaaaagttaatttgaggaaatgattttttttttcgttattttagttaagtataatcgtgttttaatattataaatttcggtattttattttattatttttatttgaatttaaattaacggtgaagattattaaggtatttaaaaaaatgattattttgatttttttatgaagtttatgttttttttagcgagataatttcgttttttaaagaggcggcgcggttacgtgggggtatttggtaggttattacgtgttcgaaatatagcgtaaaaggtacgcggtagagttatttttcggggtttattacgtgtcggtttgttaggtcggggcggagatattcgagcgtagtcgggatttcgattagggtcgatatcgttatttttcggtttaaggtattcggtttttttggagattttaggatttacgcggcgcggtttacgtggtaggtcgcgttttcgggtacgtgcgttaggagtcgagttttagttcgtacgcgtcgtaaaagtttggttttatttttttatttcgaggtttagcgtttttttttcgcgtttagtgattttgtttttttcgtcgcgttcgtcgtttttagtatttgtagaagttttttatttcgttattaagtagttagaagtcgcgagatttttttattaatcgcgcgagatttttcgtagtatggcgttttagaacgcgttcgggattgcgcgtaggttttttttttcgcggcgtcgcgttcgtttttcggaaagtaggtttatacgtttgcgttcgcgtttaaggtcgtttattttcgcgagttttattatgatggcggcggagtgtgaagcggataagtggcgtagatgagtttagaagaagttaagcgacggcgatggcggtcgcgggtgttgaagatttcggagtacgtatattcgaaggttagcgagagttcgagattgaggcgaaagattgagtttgtttagtaatcgtttgtggaaaggcgacgacggcgttttcgtgatttcgcgtcgattaattaaagttcgcggtcgtttttatgagttaatcgcgagtttttaatcgtgaacggcgcggggcggggagtaggcgggtcgaggcggttacgggagggggaggggttggtaacggcgtcgtgggggcggggttcgttttgtgtaaggttcgcgttgattgggtcgtgggcgcgcgggtttcggtttgcgtcgtgggattggcgtttttggcgtcggttgtgaggggagcgcgggggtggtggaatcgggcggttttcggttcgttaatgtggttgggttcgtaggtttgggtagttttggagttttttagagatttcgcgttcggtttcggtacgtatttacgtcgcggtttttggtggttttggagcgaggagttcgttagtatcggaagtttagggatcgcggagttttcgttggtttttttggaggtatagtttatttttgtttgttcgcgagtatggggtcggtagtttttcggttgtaggtagttttttgagagttgttaataaaggtagtcgcgggtttgtgcgaggttttttgtgagaaatgtacgaattttttttattttatagaattttaagcgggagatatttttcgatatggggaacggtttcggagaagtaattttttggttttatagggtagggagaggggtttgggagggtcgatcgtagagtcgggtttttgatcgtttataggttttttggttattatttgggtcgaatgcgttaattaaggtggtggttgcgaagttagtgttattagatggttcgggagtaggtcgagagttatcggtagggtttttcggcggtagggcgaaggaggtcgttagtgatttttacggttagttttgtgggtgggttttattcgatgtcgggtttagtaaattagagtattttttttcgtttagggtttgtcggggatttattttatttataggtttagttatggatttatttatattttattgtttttatagaattaggatatttgtagttacggttgtatttgttaaaaattattttaggtcgggcgcggtggtttagattcgtaattttagtattttgggaggtcgaggcgtatgaatcggggaggcggaggttgtagtgagtcgagatcgtttattgtattttagtttgggcgatagagcgagatttcgttttagaaagaaaagtatttgttaaggtcgggtgcgatggtttatgtttgtaattttagtattttgggaggttgatgtaggaggatcgtttgagtttaggaatttgagatcggtttgggtaatataatgcgattttgtttttatataaaaaataattagcgggtatggtggcgttcgtttggagttttagttattcgggaggttgaggtgagaggatcgtttgagtttaggaggcggaggttgtagtgagtcgagatcgcgttattgaattttagtttgaggaataagagcgaaattttattttaaaaaaaaaaaaaagaaagaaaataaaattatttgttaaatgaatgaagtatttaggtagaagtagtagtagggagagtcggtatggtttaagtggcgttgttttggagttggtttggggtagtaaaatagtaatatttaatattttataatgttgatttagtgttaggcgtttttttagttttttatatattaattaatttattttttaaaataatttttttaaaaagttattattgttttatagaaattgggatatagaggtaaattaatttgtttaggggtcgtatagttagtagtggaggcgtaggatataagtgaagatattgttgtgttattttagttttttttttttgagatagaattttattttgttatttaggttggagtgtagtggtaggattatggtttattgtagttttgatatttttagttatattaattttttttttttagttttttaaaggtgagttattacgtttggtttgtttgtttttaaatgtttttttgtttttttttgaaaatatgagtatttattgaattgtaaagtatatatatagtgtaaaatttaaaagatttaaatagatgtataataaaaggtttttttttcgtttttgttttttaggttttttagttttaaggtagtggtagttttttgtatatttttttagatttagtcgtacgtgtaaatagataagtatatttgttatatttaatataaacgttattatatatattgttttgagttttttttttgtgttaattatatgtattttgtaatttattttatattagtatatgtagagttgttttattttttttaatagttatatggtattttttgtgtggaaggattataatttatttagttattattgttggatagttagggttttttgttatgtttggttattataaattgttatagtaaatatttttatttacgttattttatataaattatatttgtagaatagttgggttaagggtatggatttttatatttttatagatgtttttttaagtgttgtttttggttggggttttttatggtcgttttagttaagagcgattttatttgttttagttggtttagattatttgttgtttttgagttttaaggttgggagatagtgttttacgttttagtagaggaagaattagatggtggtgagaggtgtgagtatggttttaattattgtggggagtgtgattagttttagatattagttaagaagttgtagggatattattgttttgagtggttattggttgtttttttgggtttgtatggattcggtttaattttgtttgttgttgtggtttggttgttttttatgaaatttgtgtagtgaggtatttatttgggatatttatgggtatttttgatttttgagatttagtaggttatagtgggttttatatttatgttaggatttgatagtttattggagggggtttgtaggtttttaaggattaattttattttttaggattgggtttttaggaaataagtgttttagttaggttttaattagttaagaaaaattatattgagtatttaaaaaagagggagtttagcgtagggacgtggtgatatgagggatagaattgttgagaagtcgaggggattgagtaggaagtagttgttttttttttaggtttttttattgaaggttatgatgagggttcgggttgatgttagggaagttttagaaggttaggaggttggggatattttgtgttttttttgtttttttttttgagttgtaggtagggttggttagatttagttagtatttagtttataaagtttgtagggtgagtttttgttatgtaggtcgagtagggtagggttgggtattttagttggtcgggagggagtttatagttttagtttttagagttttaggtttgttgagtgtgaaggtttggggtgtttgttatgaagttttttttattagtttagtttttttttgttttttttttgtttttgggtttattgaggtttttggatattgtttagattttttttaatatttttttttagatgttaaagggggattttaagtttttttttttttgttaggttttgtttagtgtgttagcgagttttttttagaggaggtatttgtgttttagggttttaggagtcggagttagagaatttagtttttgttttttcgaggtagttcgagaagttttatttgtttatttagaggtagagttagttcgttgttaataattgtaggtttttgagtttgttggaggagggtgttgtgggttttagattaacgttatttttaatttttttgttgtattttttaggtttttttatttaggaggttgggttttgttggagagaaatttgtgatgatgtagatttggggtttttaaatgttttgtttttttagtagttgttttggtagtagttttagttgttagtttagattattttttaggagtttttgaacgtttttatttttttttttttagtttttatgttaagtttttttttttaggttttttatttttttttttttgttttttttgttaatagagttattttatttttttttttatagggaaggataaattttttagagggatttttattttttgatttttatatatttgtagatattttgagttttttttgttattttaaagttttaaggaaattagagtttttttttatagtatttttttttttgtgttagcgagtttttttttatttttttttggggtttttattatagtgatttttttagttgttattcgttatttttttgtgttttttggtgtgtgggtgtgtgggggtgtgggtgtgtgtttttggatttattttgttggttaggttggagtttagtggtgttaatatagtttattgtagtttcgatattttaggtttaggtgatttttttattttagttttttaagtagttaagattataggcgtttgttattacgtttagttattttttgtattttttatttgtttgtttttgagatagagttttgttttgttgtttaggttggagtgtagtggcgtaatttcggtttattgtaagtttcgttttttgtgtttaagcgatttttttgttttagtttttttttcgagtagttgggattttaggtatttattattacgtttggttaattttttgtatttttagtagagatagggttttattgtgttagttaggatggtttttattttttgattttttgattcgtttgttttagttttttaaagtgttgggattataggcgtgagttattacgtttggtttgttatttgttattttaatattttttttttttttattgttttttttaggaataagtttttgggaagagttgataatagttgtttttagttttattaggttttttaggtttttagtttttgtaggtgttttataattttgtttttgtaggt

SEQ ID NO: 67 - DNA, 1446 bp, Artificial Sequence
  chemically treated genomic DNA (Homo sapiens)
ggagtcgttgggtttaggatggataatggttttcgttggtgtatgagatttaggttatttttttattttttgtggtttatttgtttatattgattgattgattggttgattaagatggttttgttttgttgtttaggttggagtgtagtggtgtagttataggttattgtagttttaattttttgggtttaagtgatttttttattttagtttttggagtagttgggaatataggtgtgttattatattagattaatttttatttttttttgtggagacggggttttattgtgtcgtttaggttggtttggaatttttgggattaagtaatttttttgtttcggtttgttaaagtgttgggattataggtatgaattacgggtttttattattacgttttaggaaatgtttatattggagtgtgttttttgtttttagttgggttttcgattggttattgtggtttaatggagtgtggtgtcggtagttgttagcgtttgttttttgagaggggtggcgaggggtatataggattagattgtttttattgttggatgattgggtaagtcgttttttttttttgggtttttgttttttaatatttaatattttgttgtgggttaagtgaagtttaagtttttttcgattttaatatgaggttgtttcggaatatttattttgtgttttgaatttaataatcggttgtggagggtattataggtaaatttgtattgtgagtgggttgttgttatttaattatttgatagtagttgcgaataggtgggtagtgtgttttttataggtagcgacgatttttggaggtggatttagaggtataattaagtcgcgcggcgtattagggtttaagggtatggggttttcgtagttgtggttggggtagagttggggttgtttttttttttaggagtataggcggcggtttagttttacgtttttcgtttttagttatattcggttcgcgtagtggggggtttaatagatttttttttttcgggttttagttttttcgttagtaagggcggataaggatttttttcgtttcgttagaggaggcgatcgaggggtttgagtttaggtataggtcggcgggtttaggaggcgcgaggcggatcgaattcgcgggaggagtaaagatttttgatgcgcggtcggagggcggggcggaggacgggatttacgcgattggtattttgtttttcgttttagttaatgagcggcgagggtgttttgggggcggggtagaattagtttttaagttgtagtgacgtttcggcgttattgttgcgttttatagacgtcgcgtgtattcggttgtttttaggcgttgttaggtatcgtttgggcgtcgttgttttggggttttggttcgggtttggtcggggttttttgatagcggcgggggaggcgggcgggcgtagggtgtcg

SEQ ID NO: 68 - DNA, 1446 bp, Artificial Sequence
  chemically treated genomic DNA (Homo sapiens)
cggtattttgcgttcgttcgtttttttcgtcgttgttagggaatttcggttaggttcgaattagagttttaggatagcggcgtttagacggtatttgatagcgtttgaggataatcgggtatacgcggcgtttatgaagcgtaatagtgacgtcggagcgttattgtaatttaaaggttgattttgtttcgtttttaagatattttcgtcgtttattggttggggcggagggtaggatattaatcgcgtgggtttcgtttttcgtttcgtttttcggtcgcgtattaaggatttttgtttttttcgcggattcgattcgtttcgcgttttttgagttcgtcggtttgtatttgagtttaggtttttcggtcgttttttttggcgggacgagaagagtttttgttcgtttttgttgacgagaagattgaggttcgaaaaggaaaagtttgttgggttttttattgcgcgggtcgggtgtggttggaggcgagagacgtgaggttggatcgtcgtttgtgtttttggagggagggatagttttagttttgttttagttatagttgcgggagttttatgtttttgaattttgatgcgtcgcgcggtttagttgtgtttttgagtttatttttaaaagtcgtcgttgtttatggaaaatatattgtttatttgttcgtagttgttgttagataattgagtggtagtaatttatttatagtatagatttgtttgtggtgttttttatagtcggttattaaatttagaatataaaatagatatttcgggataattttatgttagaatcggaagggatttggattttatttagtttataataagatgttaaatattggaaaatagagatttagagaaggaaagcgatttatttagttatttaatagtaggggtagtttggttttgtgtgtttttcgttattttttttagagggtaggcgttggtagttgtcggtattatattttattagattataatgattagtcgggggtttagttggaaatagagggtatattttaatgtgaatattttttaaaacgtggtggtgggggttcgtggtttatgtttgtaattttagtattttggtagatcgaggtaggaggattgtttgattttaggagttttagattagtttgggcgatatagtgagatttcgtttttataaaaaaaaataaaaattaatttggtgtggtggtatatttatgtttttagttattttaaaggttgaggtgggaggattatttgagtttaggaggttgaggttgtagtgatttatgattgtattattgtattttagtttgggtaataaagtaagattattttaattaattaattaattaattaatgtaggtaagtaaattataagggatggagaaataatttgggttttatgtattagcgagggttattatttattttaggtttaacggtttt

SEQ ID NO: 69 - DNA, 8693 bp, Artificial Sequence
  chemically treated genomic DNA (Homo sapiens)
agtttggataagatagcgagatttcgttttaaaaaaaaaaaaaaaaaaaagtataggaatgaggtattggagttagtagttgtagttttttaagagttaagttttttgtattggaggatatttagtgtatatgtgttattgatggttatggtttgagtaggtagtttgagttttttaggttgttttgagggtttttgttgatgcgagtttttattgaaaagtttagttgaggatattgtgttgaggaggttgtgggagggaggaagtatcgagtcgggtatgggagttttttcgttgtttgtgagttttttttttttgttgaattagtttttatttgattttttttaatcgttaggtgatagagattaggaagaaagaggttttatatatgtttttcgaggatgtgtttgtggagaggtttaggtgaggagaggacgggggacgtggttagggatttttagggtagttgagtaagtaggtgggtggtttgaggttaggaggggttaatgttaggaggtttagatttttgtggatttaagggtagaaggtgggttttgttgtggtttaggagttttgggtaaagtttaattttattatattattgtagtttatgtttcgagtatgtaatgttgagttatgtttgtagatgagatatagttttcgggggttttggttaagtttatgttaaatgtattttggaggagttatttttgataagatattattgtaaatttaagtaatgttttcggattatagtgggtgttgtgggttagtgttattttaatattagaggaatttaagggaaagatgttttgtaaaattaaaatgtttaatagtaggggatggttttataaattatggtttatttatatagtagataattatgataatgttttagaagaatatttaatgtaaaatatttattatataaataggttaataaaatagattatagaatagcgggtggggaaggggatatttgtgtatatttaaaaatacgggattaagttgggtgcggtggtttacgtttgtaggtttagcgatttagaagattgagtaggaggattttttgagtttatgagttcgagataattatgggtcgtaaagtaagaatttatttttataaaaaatgtttaaaaattttgttcgggttggtatagtgatttacgtttgtaattttagtattttgggaggttaaggtgggcggattatttgaggttagaagttcgagattattttggttaatatggtgaaattttatttttattaaaaatataaaaattagttaggtatggtggcgtatatttgtagttttagttattttattcgggaggttgaggtaggagaatttgtttgaatttaggaggtaaaggttgtagtgagtcgagattatgttattgtattttagtttgggtaatagagtaagattttgtttaaaaaaaaaaaaaaaaaattaggtcggttatagtggtttatgtttatgtaattttagtattagtattttgggtggttgaggcgggtagattatttgagattaggagttggagattagtttggttaatatagtaaaattttgtttttattaaaaatataaaaattagttaggtgtggtggcgtgcgtatgtaattttagttatttgggaggttgaggtaggagaatcgtttgaatttgggaggtagaggttgtagtgagttgagattatgttattgtattttagtttgggtaatagggagagatttggtttaagaaataattataataataaataaataaataaataaaattagttaggtatggtggagcgtatttgttgggaggtagagtaggaagattattttagtttggtaggttaaggttgtagtgtgttatgatggtgtttgtgaatagttattgtattttagtttgggaaatatagtgaggattttgtttttaaaaaataaaaagggggagggaagatggatttttaatttgttttatgagaatagtataattttttgatatttaaattagataagaattttataagaaaggaaaattataggtttattttatgaatattaatgtaaatgttttaaataaaatattagtaaattgagtttagtgttttttgtataaggataatatattataattaaattgggtttaatttaagaagttatggtaggtttaatattaaaaaattaataatgtaataatttattatattattagaataaaggtgaaaaattatgttatgttagataattaaaggtatttgttttaggtttttaaagaggagttagtggtataaggatgtaagggtagtggtgatttttttttagtggtattagttgaagtgagaatggtagcgttttattttggggatagaagtgacgtttatgttagacgtttgtggttttgatatgttttttgtggttttttgtggtttgttttttttttttttattggatgtgattttggttatggttttagttatattgtgtttttgtttatttttagattttggttttttaatttgtttagtgatttttttttttttttagatggagttttgttgtgtcgttaggttggagtgtagtggcgcgatttcggtttatcgtaattttcgttttttaggtttaagcgatttttttgttttagttattcgagtagttgggattataggtgtgcgttattacgttcggttaatttttgtatttttagtagagacggggtttcgttattttggttaggaatgtttttattttttgatttcgtgatttgtttaatttagttttttagagtgttgggattataggcgtgagttattgtgtttcgtttatttagtgattttaaatgtagtttaatggttttttagtttatggaggttaaagtaggttttgttgtattaaattaagaaattgggttgggtgtggtggttaatatttgtaattttagtattttaggatattgatgtggattatttgagtttaggagtttgagattagtttaggtaatatagtgaaattttgtttttattaaaaataaaaataaaaataaaataaaaaattaaaatttaaaattagttgggtatggtggtatgtatttgtggttttaggtatttaggaggttgaagtatgaggattatttgagtttaggaggtggaggttgtagtgagtagtgtttatattgttgtattttagtttgggtaatagagtgagattttaatttaaaaataaataaatagaatgagagagagagagaagaaaagaaagaaggaatttagttaaagaagttgggtttatttggattttttttggtttgttttatttgttgttattagtagttttttgaagttataaaaataatataaagtaaaataaggtaaaattattatttgtttgaaagagtttataaatttgatggtggtcgtggggtggatggaagattaaaaaaatggggatagaagtgaattagtgtaagttatttgtattgataagatggggatggatttttgtggaaggtagaggaggttatgttttatgtttttggtaggaaaagtggttaaagagggttttagagaataggggttgatggatgggttatattttgatgtgagttaagtttttggatggttggagagaggaaggatgttttagttgggggaatagtttggataatggagatttaagaaagttatgttttagtagtgtgaatgttgtggatgttgaagtgttaggatgtaaggtggagaattgggaaatggttttggaaaggggcgaaagtcgggtgatgaagtattttgtttattgtgacggagtttggattttttttgtggtttaaagggaaaggattgttgaatgtaaagttaatgttattagaaaagttgaatttataagagagttttggagtttaaaagagtattttatggggaattaggaaagttttggtatttggtagattaagtaagtgttttgatttgaagtttagtttagttttaatatttttttttatatttattatatcgtataatttggttttgtttatttattttaggttaaggtagagttttttagtttggtttgagtgttgtatttttttttttggtttgatatttggaattaaagttaagttagaattttagggttaagggggatgttgaaaattgtttgagtttttagattattttgttagtttatggtaaagggagggattagaggttatagggaaagtattttagttgttttttatagtattattttttttttatttaatggtttaggttaataggattttttttttgaggtttgggatacggaagggagttttttttaaattaggtttttggagagtaggttttaggggagtagtgtaatttatttttatatttataagacggtttttgatttttgttttttttttttttttttaaagtggaatagagagaatatgattttttacgatttttatattatagtttttaaataatggggaaatcggaggttttttcgtgtgtagacggtgatatttatcgttaaatgcgaattaggtagatgttagttttagtacgtacgtaggtaattttattttcgttttaacgattttagaggttgttcggtttgttttatacgggggtgttaagtttttcgttcgttttaagcggagatttaacgttatttataattaagttttttttgagggcgagcggttaggtgcgttttcggtaggatagtgttaattttagtttttttttagcgcgttttttcgcgttcgtttttcgtttggaagttttttttttacgtttcgcggtttttttttttttggttcggggagttgttttttgtgttgtcgggaaggttaaagtttcgcgtttattaggagagttcggtaagtatataaggatagaggagcgcgggattaagcggcggcgaaggaggggaagaagagtcgcgatcgagagaggtcgtcgagcgttttcgtttttagagagtagtttttcgagataggtaagggcgtagcgtgggggattcgtgtttttttttcgggattttttgttttcgttttcgcgatgtagtcggtcggtttcggtttcgaaggcggatttgggcgtttttggtttttcgcggtttcgagttttcgataaattttttgcgtcgattgcggtatgagaagtcgttagtagttgagttggagggtttacgttcggtttttgggcggacggtcgcgaagttgtaggcgttgtttttagggagtcggcggtttttttttttttaggggttcgcggcggttcggaggtttcgagagtttgttaggaggttttgggataattcggtttttttttttttttttgagacggagtttcgtttttgttgtttatgttggagagtaaaggggtgatttttgtttatcgtaattttcgtttttcgggtttaagcgatttttttgttttagtttttcgagtagttgggattataggtatgcgttattacgttcggttaatttttgtatttttagtagagacggagtttttttatgttggttaggttggttttaaattttcgataataggtgattcgttcgttttggttttttaaagttttggtattataggcgcgagttatcgttttcggttagttcggttttttagtattttttgtttttagtttttaggataggtgttatattttgaaagttaaattttatatacgttatcgtaaattaatgttggaaacggggtagtagagaaaaggataaaagttataatgaacgttttgtttttcggattttttcggatttagatttttgaatttttgtttttttgtttattttagcgtattcgaggtggtcgcgttatgataattatatgataattgggttaattataatgtagaatagttgggttttttttttttaagatttagttggggttaaaaataggtggtcggggcgggatttgttttagattttgaaacgtattgtttagtttcggatgttttaatagaatcggggtggacggtttatggcgtagattttgggttgagggtacgggtagttatttaggaatgattaaggtttaggtaagggggcgtttttagcgaaggagagatagtttatttggtatttggattttttaaattttttatgtttaaatggggtagggagggtttttatagaatggttggaaggagttaaggaaaataaaagtgtgtgtggattttttttgtgtgtgtgttagtttataaattttgtatagattatggttattttaatgatttattgtttttttgatgtttttgttataggattcgatgtatgtatgttatggtgtaaggataaaattcggtttttgtgtttttttaatttttataaaaggttatggttagcgtgtagttttatagtaataagtaaaatgatttgttgagtttatagagagttttttatatttatgaagttttaataagtgtagttttattataaagttaattttaggatgagtaaattttaagtttttatttttttagagttttttatttttggattataatattttttttatttaaaaaagtataatatttgatatttttttaataatttgttgttttaaaaatgatataaaaggtattatttgtttattgtagagaattgaaaatatatataagtaaatatatatatatataagtaaaatatataatataaatataagattattttttagggaagaatttgaagttttagtaatagtagttatttaattagtttagtaatagaatataagttttgagagggtgggagtgaatatgttattatattgtataatatagtatatagggtataaggaggggaaatgttttttggggttttttaggaaggtttgaagttattgtttttagtaaatggaaattattttagagtagttatttttgataagaattgaaatataattgagggaattattagatttgtaagattttgtttttttttttattaatatgttattttatatttgtatttggtgatatacgtaattattatttttttgtgattgtaatatttgggtattttttagagttaaatgtgttatggttaatttggagttttaatttaattgtttggtttattaagttttggttgtgtatttgaatagattattggtagggtataatgggaatagtttgttttttggagttaggagaggatattaaggttgattaaagttcgtttagttgtttttttagtcgaagcgtatttgggttagttattggttgttagtgttatttaatggttgttttgaaaatgtttagttttgttcggtaattttttagaagttagtatcgtgtaggtttagcgtttggggaatagggcgagggtggggtagagagaaggaagtggttttttgaagtagaaattagcgttttagaggatttttatttttaaagttttttttatataaaaaagatttggtttacgtttttttaaatgagagatttattttaggtaaatttattttaaaatgttagcgtttattaggagtgataagatatttagttatttacgttttaatgtgaattattttttttatttaattatatttttttttagtagttggttgagaagattttttgaaatttaaaatgattgtagggttggcggtgagttgattttcggtttcgaggtggttttagggggtttatttggttaagggaaatttggtagtgcgagggtagtgttggagagaggggtgggtatagggggttaggggtattatggatgttttttttttattgttttttggtgttttgattttagtttttgtttataggtatttgttggattttttaaaagtatttgtagtggttgttttattaggaggtaatttttttttggttttttttttttttatatttgtattttttttaaattttgttattttagattatatttgagagttttagagaataagatatttgatacgtgacgtgtttagaagatgagttagattttaaagaattgagatttgttttaaaaacgaagttttttaaagttattggagtttgggtaatagtgattattagagtaatttgtgtgtaggatattaaattaggttgttcgaaatgttgtttaaattggttagtggttttatttgtttttttgttaatttaatatttataggaaatagagttttagaggaatgataggattttggtggaataaaaagggaaaagattattttgagtaggagttttagggtttttcgttttttttaagttatttttatttttgagattttgtatgttagaattatagtttaatgtagtgaaataggaaagttttttgttaggagtttagttttattttgttatggatattaaagtaattgtttttttttgggttttaatttttttattttttatgggaagggttgaattaagtaatttttaaaatagtttttagttttaatttttttaggggtttcgtttaaatagaagataatagggaaatggttatagtttatttattatttttttttttttattataatttatattatcgttgtattgtatatttttttttttagtattgttgttgtttttaaaatgtttttaattttataagagagtgtgttgttaatgttggtttaaggttttttttggtgagtggttaatattgttttgttttttgtaggggttttattaattttgtttgtttttgtaga

SEQ ID NO: 70 - DNA, 8693 bp, Artificial Sequence
  chemically treated genomic DNA (Homo sapiens)
tttgtagaagtaaataagattggtgggatttttgtaaggagtaaaataatgttggttatttattaggaaggattttgagttaatattaataatatatttttttgtggagttaaaggtattttaaggatagtagtaatgttgagaaaggaggtgtgtagtatagcggtggtataagttgtgataaggaggagggaatggtgggtaaattgtgattatttttttgttattttttatttaaacgagatttttaaaaaggttaaggttggaagttattttggggattgtttggtttagttttttttatgagagatgggaaaattgaagtttaaagagagataattattttaatgtttatgataaggtaaggttaagtttttaatagagaatttttttattttattatattaagttgtagttttaatatgtaagattttaggagtgaaagtaatttgggaaaaacggaggattttgaaatttttgtttaagatggttttttttttttttattttattaggattttattatttttttgaaattttattttttatgaatattaggttgatagaaaagtaaataaaattattggttaatttaggtagtatttcgagtagtttgatttgatgttttgtatataaattattttggtgattattattatttagattttagtaattttggagagtttcgtttttaaagtagattttagttttttgaaatttggtttattttttggatacgttacgtgttagatgttttgttttttagagtttttaaatgtggtttgaaatggtaggatttgaagaggatgtagatgtggaggggaaagagattagaagggaattattttttggtggaatagttattgtagatatttttggagaatttagtaagtgtttgtgggtagaagttgaggttaagatattaggggatagtaaggagggggtatttatggtgtttttagttttttgtatttatttttttttttagtattattttcgtattgttaaattttttttaattaggtgggttttttgaagttatttcgaggtcggagattagtttatcgttaattttataattattttggattttagaagatttttttagttagttgttagaaagaaatgtaattagatgagaaaagtaatttatattaaagcgtggatgattaagtgttttgttatttttaatgaacgttggtattttaaaataagtttgtttaaaataaattttttatttggggaggcgtgggttaaattttttttatataggggaggttttggaagtgaaagttttttgaagcgttgatttttattttaggaggttatttttttttttttattttattttcgttttattttttaggcgttgggtttgtacggtgttagtttttgaagggttgtcgggtaaggttgagtatttttagagtagttattagatggtattggtagttagtgattggtttaggtgcgtttcggttaaaggggtaattgaacgagttttggttaattttggtgtttttttttggttttaagggataggttgtttttattgtattttgttagtgatttatttaagtatatagttagaatttggtggattaggtaattagattaaagttttaagttgattatagtatatttagttttgaaaaatgtttagatgttatagttatagaaaaatggtagttacgtatgttattaaatgtaaatgtaaagtaatatattagtaaaggaaaaaataaaattttataggtttgatagtttttttaattatattttaatttttgttaaagataattattttggagtgatttttatttgttagaagtaatgattttaggtttttttggaaagttttagagagtattttttttttttatgttttatgtgttgtgttgtataatgtggtaatatatttatttttatttttttagagtttatattttgttgttaaattggttagatggttgttattgttaaaattttagatttttttttgaaagatggttttgtgtttgtattgtatattttgtttatgtgtatgtgtatttgtttatgtgtatttttagttttttataatgaataaatagtattttttgtgttatttttaaagtaataaattattggggaaatattaaatgttgtgtttttttaagtagggaaagtattataatttaaaaatggaaagttttggaaaaatagaaatttgaaatttgtttattttgagattaattttatagtagaattatatttattagaattttataggtgtgaggggttttttatgagtttaataaattattttgtttgttattgtaaaattgtacgttggttatgattttttgtaaagattagaggagtataggggtcgagttttgtttttatattatgatatatatgtatcgagttttataataaaagtattaaaggaatagtaagttattaaagtggttataatttgtgtagagtttataaattgatatatatataaaaaaaatttatatatatttttattttttttggttttttttagttattttgtaagaattttttttgttttatttaaatatgaagaatttggggaatttaaatgttaagtggattgtttttttttcgttgaaaacgtttttttatttgagttttgattatttttaaatggttgttcgtgtttttaatttaggatttgcgttataaatcgtttatttcggttttgttgaggtattcgaaattagatagtgcgttttaggatttaggataagtttcgtttcggttatttgtttttaattttagttaggttttggagagaagagatttaattattttgtattgtaattgatttagttattatgtaattattatagcgcggttatttcgggtgcgttaaggtgggtaaggaaataaggatttaggggtttgaattcgaaaaaattcggaaggtagggcgtttattatgatttttatttttttttttgttgtttcgtttttaatattaatttgcgatagcgtgtatggaatttgatttttaagatgtgatatttattttggaaattgggagtaagagatattaaaagatcgggttggtcgggggcggtggttcgcgtttgtaatgttagaattttggggggttaaggcgggcggattatttgttgtcgggagtttgagattagtttgattaatatggagaaatttcgtttttattaaaaatataaaaattagtcgggcgtggtggcgtatgtttgtaattttagttattcgggaggttgaagtaggagaatcgtttgaattcgggaggcgaaggttgcggtgagtagagattatttttttgttttttagtatgggtaataagagcgaaatttcgttttaaaaaaaaaaaaaaagatcgggttgttttaagattttttagtaagttttcggagttttcggatcgtcgcgagtttttgggggagaggaggtcgtcggttttttggagatagcgtttgtagtttcgcggtcgttcgtttaggggtcggacgtgggttttttagtttagttattggcggttttttatgtcgtagtcggcgtagaaagtttgtcgagaattcgggatcgcggagagttagaggcgtttaggttcgttttcggagtcggagtcggtcgattgtatcgcgaggacggggataggggatttcggggaaagagtacgggttttttacgttgcgtttttatttgtttcgggaggttgttttttgagggcggggacgttcggcggtttttttcggtcgcggtttttttttttttttttcgtcgtcgtttggtttcgcgtttttttgtttttatatatttgtcgagtttttttggtgggcgcgggattttgattttttcggtagtataaggagtagtttttcgggttaggggaaggggggtcgcggggcgtgggaggggggtttttagacgggggacgagcgcggggagacgcgttggaaaggggttggaattagtattgttttgtcgaaggcgtatttggtcgttcgtttttaggaagaatttaattatggatggcgttgggttttcgtttagaacgggcgggaggtttagtattttcgtgtggggtaggtcgggtagtttttgaggtcgttgaggcgagggtgaagttatttgcgtgcgtgttggggttggtatttgtttggttcgtatttggcggtaaatattatcgtttgtatacggggaggttttcgatttttttattgtttggaaattgtgatgtggaagtcgtggggaattatattttttttgttttattttggggaggggaggagggagtagaagttaggagtcgttttgtgggtgtgaaggtgagttgtattgtttttttggggtttgttttttaagggtttggtttaggggaggttttttttcgtgttttaagttttaaggaaaaagttttgttaatttaaattattaaatggggagagggtgatgttgtgaagagtagttgaagtgttttttttgtggtttttgatttttttttttgttatgagttggtagggtggtttggggatttagataatttttaatattttttttggttttggagttttggtttggttttagttttaaatattagattagagagaagagtatagtatttaaattaagttaagagattttattttaatttggagtaaataaataaaattaaattgtgcgatgtggtgggtgtgggagggagtattgggattaaattggattttaaattaagatatttgtttaatttgttaaatgttagaatttttttgattttttatgagatgtttttttggattttaggatttttttgtggatttagtttttttggtgatattggttttatatttagtaattttttttttttggattataagagagatttaagtttcgttatagtagataaggtgttttattattcggttttcgtttttttttagggttattttttagttttttattttgtattttggtattttagtatttataatatttatattgttagaatatggtttttttgggtttttattgtttaagttgtttttttaattagaatattttttttttttttagttatttaggagtttgatttatattaagatgtagtttatttattagtttttgttttttgaagttttttttggttattttttttattaggggtatgaggtatgattttttttgttttttatagaagtttatttttattttgttagtgtaagtggtttgtattaatttatttttgtttttatttttttaattttttatttattttacgattattattaggtttgtaaatttttttaagtagatggtggttttgttttattttattttgtgttatttttgtaattttaggaggttgttggtggtagtagataaaataaattaggaaaaatttaaatggatttaatttttttaattgggtttttttttttttttttttttttttttttttattttgtttgtttgtttttgaattagggttttattttgttgtttaggttggaatgtagtagtgtgaatattgtttattgtagtttttattttttgggtttaagtgatttttatgttttagttttttgagtatttggaattatagatgtatgttattatgtttagttaattttgggttttggttttttgttttgtttttgtttttgtttttggtagagatagggttttattatgttgtttaggttggttttaagtttttgggtttaagtaatttatattagtattttgaagtgttgggattataggtgttagttattatatttagtttagttttttaatttaatgtagtagaatttgttttggtttttatgaattgaaaggttattgaattgtatttagaattattgggtaggcggggtatagtggtttacgtttgtaattttagtattttgggaggttgagttgggtagattacgaggttaagagatggagatatttttggttaagatggcgaaatttcgtttttattaaaaatataaaaattagtcgggcgtggtggcgtatatttgtagttttagttattcgggtggttgaggtaggagaatcgtttgaatttgggaggcggaggttgcggtgagtcgagatcgcgttattgtattttagtttggcgatatagtaagattttatttaaaaaaaaaaaaaaattattgggtaggttgggggattaggatttaaaaatgggtagggatatagtgtggttggaattatggttaaaattatatttagtggagaaaaaaaaaatagattataaggggttataaggggtatgttaagattataggcgtttgatatagacgttatttttgtttttaggatgggacgttgttatttttattttagttaatgttattagaaaggagttattattgtttttgtatttttgtattattagtttttttttgaaagtttagaataggtgtttttgattgtttgatatgatataattttttatttttattttagtaatgtggtgaattattgtattgttgattttttggtgttaaatttattatggttttttagattaaatttaatttgattatgatgtattatttttatatagaaagtattggatttaatttgttaatattttatttaagatatttgtattgatgtttatgagatgggtttgtaattttttttttttgtggaatttttgtttaatttgagtattaaaaaattatgttgtttttataaaataagttggaaatttattttttttttttttttttattttttaaagatagggtttttattgtgttttttaggttggagtgtagtggttatttataggtattattatagtatattatagttttgatttgttaggttaaagtgatttttttgttttgttttttaataggtacgttttattatatttggttaattttatttatttatttatttattattataattattttttagattaagtttttttttgttgtttaggttggagtgtagtgatatgattttagtttattgtaatttttgttttttaggtttaagcgatttttttgttttagttttttaagtagttgggattatatgcgtacgttattatatttggttaatttttgtatttttagtagagatagggttttattgtgttggttaggttagtttttaatttttgattttaagtgatttgttcgttttaattatttaaagtgttagtgttgggattatataggtataagttattgtgatcggtttaattttttttttttttttttagatagagttttgttttgttgtttaggttggagtgtagtggtatgatttcggtttattgtaatttttgttttttggatttaagtagatttttttgttttagtttttcgagtagagtagttgggattataggtgtgcgttattatatttggttaatttttgtatttttagtagagatggggttttattatgttggttaggatggtttcgaatttttgattttaagtgattcgtttattttagttttttaaagtgttgggattataggcgtgagttattgtgttagttcgggtaaaatttttaaatattttttgtagagatgggtttttgttttgcggtttatggttgtttcgaatttatgggtttaagagatttttttgtttagttttttgagtcgttgggtttgtaggcgtgagttatcgtatttagtttagtttcgtatttttaaatatatatagatatttttttttttattcgttgttttgtgatttattttattgatttatttatgtaatgggtattttatattaaatatttttttaaaatattgttatgattgtttattgtatggatgggttataatttataaagttattttttattgttagatattttggttttgtaaaatattttttttttgagtttttttgatgttgaaatgatattggtttatagtatttattatgattcgaaaatattatttggatttatagtaatgttttgttaggaatgatttttttaggatgtatttagtatgggtttggttaaagttttcggaggttgtgttttatttgtaaatatggtttagtattgtatgttcgaggtatggattgtagtaatgtgatggggttgaattttatttaggatttttggattatagtagagtttattttttgtttttgagtttatagaagtttgagttttttggtattgattttttttgattttagattatttatttgtttatttagttgttttggggatttttgattacgtttttcgttttttttttatttgggtttttttataaatatattttcggggagtatgtatggagtttttttttttttggtttttattatttggcggttgggaggaattagataagagttggtttagtagggagagggagtttataggtaacgaaagagtttttatgttcggttcggtgtttttttttttttatagtttttttagtatagtgtttttagttgagttttttagtggaaattcgtattaatagggatttttagggtagtttgagaagtttaagttgtttgtttaggttatggttattaatgatatatgtgtattaagtgttttttaatgtagggaatttaatttttaagagattgtagttgttggttttaatgttttatttttatgtttttttttttttttttttttgagacggagtttcgttgttttgtttaggtt

SEQ ID NO: 71 - DNA, 8085 bp, Artificial Sequence
  chemically treated genomic DNA (Homo sapiens)
  unsure (2545)
gttttatgatttaattattttttaatatttttttttattaagattattatattggtgattgggttttgatatatagatttggggagaatataaatatttatattatagtatttattaatttatttagttattttattgttaggtatttatttagaaaaaatgaaaatatatgtttatataaagatttgtataatatttttatagtagttttatttataatattaaaaaaattggaaataatttagatatttatttatagttaaatggataaataaattatagtatataaataaaaagaataaaaagaattaattattgatatatattataatttagttgaattttaaaataattatgttgagtgagagaaattaaatgaaaaaaagatatattatattatatataattttaagaaataaaatttaatttatttggtatttagatttttatttttatattagttttaaataaaaagttttaaatttttttggataaatggttgattttacgattggggtaggaaatatataagatgagtttgatgagtttgtagtattttgtaatattagaaagtaggaaagtttatatatatatatatatatatataatatagagagtgggttaaggagtataagagttaattgaaaaagtttttagtgttaaaaattggaaaaatttgagtaataaagtatttatgaatttatataaagaaaagattgaataaagaagtaaatgggggagaagaagtaaattttttttatagaattttaaataaattatgtagatattttattttaaaggagggttagtataattttttatttttttatatttttttaagtgatttataatgatttttttttaaagagtatagagtatgtaaagagggaaaaaagagtaattatgtaatggagaaatttgataaatattattttagttaggtgatggagaataatattaatagttataagttatgttgataatatgtattttttatatgatgtaataaatatagtatattatttttttgatttttatttcgttaaaatttaaaattttagtttatttatgaggatatattaaattttaatagaagggtattttgtaatatattttattagtatttttaaggattgttaaggttattaaatataaggaaaatttgagaaatttttatagttaagaggagtataagatattataataattaaatgtggtgttttggatggaattttggaaaggaaaaaggatattaagtgaaaatgaagaaaatttaaataaattatgaatattagttaataataatttattagtattagtttattaattgtaataaatgtattttattaatttaaaatgttaatagagaaaattgtataaatgatatatgagtattttttatattatttgtttaatttttttgtaaatttaaaatcgttttttaaaagtaaaatttattaataaaatatttaaagtaaatagatttaaaaggtatatgtaaatgtataatttaatgtttaataaattagatataaatatttttaaaaatttaatatttggtgatagaaagtagattagtggtttgttagaaagtggtgattagtattaggggaaggggatgggatagaatagtatgaagggatttaaaaaatggtatgaggaaatttttggaggtaaagggtatgtttattattttagttttataggtttaataataaattatataatttaaatatatgtagtttattatatgataattatattttgataaagtggtttttttttttaaattatagaaaaaatatttttatatttaaatttttttttttaaaaatagtttttaggaatatttgaagttagttttattatatttgaatttaattagtgaattttgtttatttaaagatttatatatttgggaagtttttgtgttaaaaatgttaattatttagtattaaaatttatggaataatggtgatttaggatatgttggatatttttattgttgtttttttattttaagatttttaattttttggaaataatttttttagatattttgataagggaattattataattaattaaaattaagttaaatatagtttgttagatttaaaatgaggttaagtgttaattttatagtagcgatcggaaaattaaattatatggtatttgatatttaaaattatatttttaagaaggttgttatttgatgttttgggtttgggttatagtatttaattttataatattgggtaattttgtgttttagtttttttaattatgaaattgggataatagtatttattttgtgagattgttgaaggattatagttaatataggtaaaaggtttataagattatttggtaatgttgttttgattttataaattttatatattgtgtggtattagttattaggaaaatataaataaattagtgagatattattttatatatttggggggttataataaaaaagatagataaaaaatgttgttaaagatgtgaagaaattaggatttttatttattgttggtgnaaatgtaagaagtataattatttgaattatagtttggtagttattttaaagattatatttagagttgttatatgaattagtaattttatttttatgtatatatttaggagaaaggaaaatatacgttgtataaaaatttgtatatgaatgtttattagtaggattttttatggtagttaaaaggtgtaaataatttaaatgtttaataattgatagagatggataaataaaatgtggtttatttatataatgaaatattatttgttaataaaaaggagtgaaggagtgaagtattgatttatgtggaatatggatgaattttgatttaaaatagttaaattataggtataaaaagtatattagtggttgttgggagatttaggcggaaatgtggaataattgttagtgggtattgagattttagagttatatttatgttataaaattaatagtgttgatggttgtataattttgagtatatgaaaaattaatgaattgatattttgagtgagttgtatgatattggaattatattttaataaagtatggtaattgttttaagataggttggaaagagaaagtttgaaaataataataatgatattaataaattagtttatttttttagttttatatatttttgtgtttatatttgtttttgttttatttataatggtttttttgtagttgttatattatattttgttatttgatgttcggtgaatattttatatttgttttttagaattttttttattttttttttatttgtttaatttttatatatttaaaattaattagagtaaattatttattagaataattaattttaaattttagtaatttaatatgataaaggtttgttttttatttatatagtttttttttagatgatcgaggggtttaggttttttatttttagtggtttttttattttttggagttttttgtattttttatatatggttgagataaattatgagttattagtatagttagattttgaggttttataagaaaatttgtaaattatttattttgttttgaataaggtatatttaagatgatgttaaaatatttaatggttttgggttaaatatagtttatgattgtgtatttaaaatatatattgtaatatttttttttttttttattgattttatgaatttagcggggatttattttataagtttaaagataattattttttagattaagaatatttagggtaaaaagtattgtttaatatttttattgaggatgttatgatgtagtatattgtataagttggagttaaaggaaattttttttaaagtgttatttattaaaaattggaatatattttttaagataaatcgaagtgtggtatataatatttaaatttttattatagatatagaggtgttattattttttatttttaaatttttttgttacgttgaggatatttaagaggagtaggatatgttggtcgtagtaggagaaatttgaaagtatttatttttatggaatttataagggagagaattttttattttagtatcgtttttgatatatttattattttaaaagataatgtagttaaatgtttttttttgtgttaaatttttataaaattgaaattttaaaatggtgataaaaattttatttttgatagaatttatttatttttttaattagatagggtataatttttaatttgtaaaataaaacgtaatatgtttatgaggttttattttaaagaatttgttattgagagtagtatttagaataacgggtggaaatgttaattttagagttttagattttatcggtaattggggtagggaggggttttgggcggggtttttttagaggaggaggcgttgttagaaagttgtttggttagtttatagttgttattaatcggggtaagttttgttgtatttgtgcgtgtgggtggtatttttaatgagaattagttttatttgttatttgagtgaaatttataattcgaggcggttagtgttttcgtattattgggatttgagattttcggagatgattgtcgttcgtagtacggagttagtagaagttcgattttttttgggaatgggttgtatcgagaggttcgattagttttagggttttagtgagggggtagtggaatttagcgagggattgagagttttatagtatgtacgagtttgatgttagagaaaaagtcgggagataaaggagtcgcgtgttattaaattgtcgtcgtagtcgtagttatttaagtgtcggatttgtgagtattttgcgtttttagttttcggatagaagttggagaatttttttggagaatttttcgagttaggagacgagattttttaataattattatttttttttgcgttttttatttgtcgttcgttgggataaacgatagttatagtttttttgacgataggatggaggttaagggtaggagttgattagcgtcgttttttttcgttttcgatttaggaggtggagattttttcggtttagttatatttaatatttatttttttttttttttgtttttatattttcgaaatttttttttttttttttttttttttttttttggagacgggggaggagaaaaggggagtttagtcgttatgattgagttgaaggtaaagggttttcgggttttttacgtggcgggcggttcgttttttttcgaggtcggatttttattgttgtgtcgtttagtcgtaggttcgttttcggggagttagatttcggatattttgtttgaagtttcggttatatttatttttttggacgggttatttttttttcggttttgttagggataggattttttcgacgaaaagacgtaggattagtagtcgttgtcggacgtggagggcgtatattttagagttgaagttataaggggtgttggaggtagtagttttagttttttagaaaaggatagcggattgttggatagtgttttggatattttgttggcgtttttaggtttcgggtagagttaatttagttttttcgtttgcgaggttattagtttttggtgtttgtttggtttcgaatttttcgaagatttatcggttgttttcgttatttagcgggtgttgttttcgtttatgagtcggttcgggtgtaaggttggagatagtttcgggacggtagttgtttataaagtgttgtttcggggtttgttattagttcggtagttgttgttttcggtttttgagagtttttattggttcggggttttagtgaagtcgttttcgtaggtcgttgcggtggaggttgaggaggaggatggttttgagttcgaggagtttgcgggttcgtttttgaagggtaaatttcgggttttgggtggcgcggcggttggaggaggagtcgcggttgtttcgtcggggcggtagtaggaggcgtcgttttggtttttaaggaagattttcgttttttagcgtttagggtcgttttggtggagtaggacgcgtcgatcgttcgggacgttttcgttggttattacggtgatggattttatttacgtgtttattttgttttttaattacgttttattggtagttcgtattcggtagttgttggaagacgaaagttacgacggcggggtcggggttgttagcgtttttgtttcgtcgcggagtttattttgtgtttcgtttatttcggtcgttgtaggcgattttttcgattgcgcgtattcgttcgacgtcgagtttaaggacgacgcgtattttttttatagcgatttttagtcgttcgttttaaagataaaggaggaggaggaaggcgcggaggttttcgcgcgtttttcgcgtttttattttgtggtcggtgttaatttcgtagttttttcggatttttcgttggggttatcgttttcgttgtcgtcgcgagcgattttatttagattcggggaagcggcggtgacggtcgtattcgttagtgttttagtttcgtttgcgtttttttcggggtcgattttggagtgtattttgtataaagcggagggcgcgtcgttttagtagggttcgttcgcgtcgtcgttttgtaaggcgtcgggcgcgagcggttgtttgttttcgcgggacggtttgttttttattttcgtttttgtcgtcgtcgtcggggcggttttcgcgttttattttgtattcggttttaacgggttttcgtagttcggttattaggtcgtcgtgtttaaggagggtttgtcgtaggtttattcgttttattttaattatttgaggtgagggttcgggacggggtacgtttagcgcgttcgggagtagcggtttcgttggcggcggcggtcgttaatttttagttttagttttagcgtatcgttgcgtttttcggggcggtcggagagggtgggtagcgggatatagtataggggtagttgtttttttttttttttttttttttttttatttttggggatacgaaggtgggcgtagaatatattatttttggggcgtgtttttttgaaagttgtttttttgtttgttttttaatttttcgaattttttagatttcgaagtagaattaatttcgatttaaaacgtgtagcgttatattaggttcgttgtagtttagtggggtagaaagtgcgcggcgagttgggggttttatgaaatgttttttttttagaagaaggacgtttattaggagtgtttgttttggagaggagttaaggtatcgttttttcgggaggggtgggatttgagaggtggtcggttagaatcgaaagtagtattattttagggatttgaatattttagtggtttagtttttttaagaattttaagattaaaattaagtttacgtgggaaatgtttaaattgtggatttaaacgtttgttattgtattgtatcgtttttttattattgtttgttatttattataattttttttatatataggtttaaaaaatattattttgtatattgaagtaatggaatgtaaaaaaagaatgttttgtttggaattttatgttgtgaataggtaaaatagtgttagtgtattggataatattttaaaatgataaatatatatttgtttaagtaagtaatgattatagggttgtgttttaaaaatttaaaattaaaatattgtaaagtattatcgaatttttaaagttaaattatatttgttttgatttagtatatagataggaaggatataatattttatttgttaaagattaaattgtttttatataaagagttttgtagaaagatttttttttaatcgattttaattttttaggatataatattatatattaattattgtttttttatattggtgttattgatgaatggttaattatttgtaagtatggtgaatttagttacggatagtttattattaagtttagtttgtatgttttttaagtgtatatatatagttttgtttttaaaatttttttttattttgttaatattggtttaagaaatttttagtattagatagtggtgtatttaaaaataaatggagtattttgttttgtattttaagg

SEQ ID NO: 72 - DNA, 8085 bp, Artificial Sequence
  chemically treated genomic DNA (Homo sapiens)
  unsure (5541)
ttttgaaatgtaaaataaagtattttatttatttttaagtgtattattatttaatattaaaggttttttaaattagtattaatagggtgaaaggagattttaaaaatagaattgtatatatatatttgaaagatatgtaaattaaatttggtaatagattattcgtaattggatttattatatttgtaaatgattagttatttattagtagtattaatataaaagaataataattagtgtataatattatgttttagaaagttaaagtcggttaaaaggaaatttttttataaaattttttatatagaaataatttagtttttgataaatgaaatgttatgttttttttgtttgtatgttgggttaaaataaatatggtttggttttaaaagttcgatggtattttgtaatgttttggttttgagtttttaaaatataattttgtaattattgtttatttaagtaagtatatgtttgttattttaaagtattgtttaatatattgatattgttttgtttatttataatataagattttaaatagagtattttttttttatattttattattttagtatgtaaagtagtgttttttaaatttgtatataaaaaaaattgtagtgaatagtaagtaataataagaaaacggtgtaatgtagtgataggcgtttaaatttatagtttaaatattttttacgtgaatttaattttaattttgagatttttaagaaaattgagttattgaagtgtttaaatttttaagatggtgttgttttcggttttggtcggttattttttaagttttatttttttcgggggaacggtgttttaatttttttttaagataagtatttttggtaaacgttttttttttaagaaagaagtattttataaagtttttaattcgtcgcgtattttttgttttattgggttatagcggatttagtgtgacgttgtacgttttaaatcggggttggttttgtttcggaatttggaagattcggaaagttaaaaaataaataaaaaaatagtttttagggaggtacgttttaaaaatagtatattttgcgtttattttcgtgtttttaagagtgaggagaggagggaagaagaagggaggtaattgtttttgtgttgtgtttcgttgtttatttttttcggtcgtttcggggagcgtagcggtgcgttggggttggggttgagggttggcggtcgtcgtcgttaacggaatcgttattttcggacgcgttgggcgtgtttcgtttcgggtttttattttaggtagttgagatagggcgggtagatttgcggtaggttttttttgagtacggcggtttggtagtcgagttgcgggagttcgttgaggtcgagtgtagggtagagcgcgggggtcgtttcggcggcggcggtagaggcggaggtggagggtaggtcgtttcgcgggagtaggtagtcgttcgcgttcggcgttttgtagggcggcggcgcgaacgggttttgttggggcggcgcgtttttcgttttgtataggatgtattttagggtcgatttcgaggaggacgtagacgagattgaggtattggcgggtgcggtcgttatcgtcgttttttcgggtttggatggggtcgttcgcggcggtagcgggggcggtggttttaacgggaaattcgggaaggttgcggggttggtatcggttataaggtaggaacgcggggagcgcgcggaggttttcgcgttttttttttttttttttatttttagagcgggcggttggaagtcgttatagagagggtacgcgtcgtttttgggttcggcgtcgggcgggtacgcgtagtcggggaagtcgtttatagcgatcggggtggacgaggtatagggtgaatttcgcggcggggtaaaggcgttggtagtttcggtttcgtcgtcgtaattttcgttttttagtagttgtcgagtgcgggttgttaataaggcgtgattgagaggtaggataggtacgtggatgaaatttattatcgtggtggttagcggggacgtttcggacgatcggcgcgttttgttttattagggcgattttgggcgttgagaagcgggaattttttttggggattagggcgacgttttttgttgtcgtttcggcgggatagtcgcggttttttttttagtcgtcgcgttatttagagttcgaggtttgttttttagaagcggattcgtagatttttcggatttagagttatttttttttttaatttttatcgtagcggtttgcggagacggttttattggggtttcggattagtgagggtttttagaggtcgggagtagtagttgtcgggttggtgataggtttcggggtagtattttatgggtagttgtcgtttcggagttgtttttaattttgtattcggatcggtttatgagcggggataatattcgttgggtggcgggggtagtcggtggattttcgggaagttcggggttaaataggtattaagagttggtgatttcgtaggcgggagggttgggttggttttgttcgggatttgagggcgttaatagagtgtttaagatattgtttagtagttcgttgtttttttttgggggattagaattgttgtttttagtattttttgtagttttagttttggaatatgcgttttttacgttcgatagcgattgttggttttgcgttttttcgtcggaggggttttgtttttggtagggtcgagggaagagtagttcgtttagggagataggtatggtcgaaattttaggtaaggtgttcgaggtttggtttttcgggaacggatttgcggttgggcgatatagtagtggggattcgatttcgggggagggcgggtcgttcgttacgtggggagttcggggattttttgtttttagtttagttatgacgattggatttttttttttttttttttcgtttttagggaggagggaaaagggaaggaggagggggtttcgggaatataggggtagagggaggagaaagtgggtgttgaatgtggttggatcggagggatttttattttttgggtcgggggcgggggagggcggcgttggttagtttttgtttttggtttttattttgtcgttaggggaattgtggttgtcgtttgttttagcgagcggtaagtggggagcgtaagaaaaagtagtaattgttaggagatttcgttttttaattcggggagttttttaagagagttttttaatttttgttcgaggattggagacgtagagtatttataagttcggtatttgagtggttgcggttgcgacggtaatttagtgatacgcggtttttttatttttcgattttttttttggtattaaattcgtgtatgttgtgaagtttttagtttttcgttgagttttattgtttttttattaaaattttggggttagtcggatttttcggtatagtttatttttaggaagggtcggatttttgttggtttcgtattgcgggcgatagttattttcgaagattttagattttagtagtgcgggagtattagtcgtttcgggttgtagattttatttaaatgataagtgaagttagtttttattgagaatgttatttatacgtataaatataataaggtttatttcgattagtgatagttgtggattggttagatagttttttaataacgtttttttttttagggaggtttcgtttaaagtttttttttattttaattatcggtaggatttgaaattttggagttggtatttttattcgttattttgaatgttatttttaatagtaggttttttgggatggaattttataagtatattacgttttgttttgtaaattaagaattatgttttatttaattggaaaaatgaatagattttattagaagtagaatttttgttattattttaagattttagttttgtaaagatttaatatagaggaagatatttggttatattattttttaaaataataaatgtattaaggacgatattaaaataagaaatttttttttttatgagttttataaaagtgaatgtttttaagttttttttgttgcgattaatatgttttgttttttttgagtatttttagcgtgataaagaaatttgggagtgggagatggtaatatttttgtatttatgatggaagtttggatgttgtgtgttatatttcgatttgttttaaggaatgtgttttaatttttagtaaatagtattttaaggaaagttttttttagttttagtttatatagtgtgttatattataatatttttagtagagatgttgaatagtattttttattttaaatatttttagtttgaaaagtaattatttttgagtttataaaatggattttcgttaaatttatgaagttagtagaaaaagggaagaatattgtaatatatattttagatatatagttataaattgtatttgatttaagattattgggtattttaatattattttaaatatattttgtttaaaatagagtgaatgatttgtaaatttttttgtaggattttaaggtttagttgtgttaatgatttatagtttattttaattatgtataaagaatgtagaagattttagaaggtgggggagttattagaggtaaggagtttggatttttcgattatttggggaggggttatatgagtgagaaataaatttttattatgttaggttattaggatttggagttggttgttttagtaaatagtttattttgattaattttagatatgtggaagttaggtagatagaggaaaggtaaagagaattttgggaagtaggtatagaatgtttatcgggtattaaatggtaggatataatatggtaattgtaaggggattattatgaatagaataggagtaagtgtgggtatagaagtatatgagattagagaagtaaattaatttattaatattattattgttgtttttaggttttttttttttagtttattttaaaatagttattatgttttattgaggtgtaattttagtattatatagtttatttaaagtattagtttattgattttttatgtatttagagttgtgtaattattagtattattaattttgtaatatgagtatgattttaaaattttaatatttattagtagttattttatattttcgtttaaattttttagtagttattaatatgttttttgtatttgtgatttggttattttggattaaggtttatttatgttttatatgaattagtattttatttttttatttttttttattgataaataatattttattgtatggataaattatattttatttatttatttttattagttgttggatatttgggttgtttatattttttggttattatgaaaaattttgttaatgaatatttatgtataagtttttgtgtagcgtatattttttttttttttggatatatgtataggagtggaattgttggtttatatggtaattttaggtgtggtttttggagtaattgttagattatggtttaaatgattgtattttttatatttntattagtagtgaataagggttttagtttttttatatttttgataatattttttatttgttttttttgttatagttttttaagtgtgtgaagtggtattttattgatttatttatatttttttgatggttaatgttatatagtgtatagaatttgtaaaattaggatagtattgttaggtagttttgtaagttttttatttgtgttaattgtaattttttaatagttttataaaataggtattgttattttaattttatagttgggaaaattgaggtataaggttatttagtattataaagttaagtattgtaatttaaatttaagatattaaatgatagtttttttaggagtgtgattttaaatgttagatgttatataatttgatttttcggtcgttgttgtaaaattggtatttggttttattttaaatttgataaattatatttggtttgattttggttggttataataatttttttgttagaatgtttggggaggttgtttttaaaagattgaaaattttgaagtgggaaaataataataaagatgtttagtatgttttaaattattattattttataaattttgatgttgggtgattagtatttttggtataggaattttttaaatgtatgaatttttgaatgaataaaatttattgattaaatttaggtgtgatggggttaattttaaatatttttgaagattgtttttggagaagaggatttaaatgtggaagtattttttttatagtttggggaaaaaaattattttattaagatatagttgttatataataagttgtatatatttaaattgtataatttgttgttagatttgtgaaattaaaatgataaatatattttttgtttttaaaagtttttttatgttattttttaaatttttttatattgttttgttttattttttttttttagtattaattattattttttggtaagttattaatttgttttttgttattaaatattaggtttttaaaaatatttatatttgatttattaaatattaaattatatatttgtatatgttttttaggtttgtttgttttagatgttttattaatagattttatttttgggaaacgattttggatttatagaaaaattgagtagataatatagagaatgtttatatattatttgtataattttttttgttagtattttaaattaatagggtatatttgttataattaatgaattaatattgataaattgttattaattaatatttatagtttatttagattttttttatttttatttaatgtttttttttttttttaggattttatttaggatattatatttaattgttatgatgttttgtgttttttttggttgtgagagttttttagattttttttgtatttgatgattttgatagtttttaggagtattggtgaggtatattgtaagatgtttttttattgggatttgatgtatttttatgagtagattagggttttgggttttggcggggtggaaattaaagaggtaatgtattgtatttattatattatatgaagggtatatattgttaatatgatttatgattgttaatgttgttttttattatttggttgaagtagtgtttgttaggtttttttattgtatagttatttttttttttttttttgtatattttgtattttttggaaggaaattattatgagttatttaaggaagtgtgggggagtagggagttatgttagtttttttttggagtggagtatttatataatttatttggaattttgtgaggaagatttgtttttttttttttatttatttttttatttagttttttttttgtatggatttatgaatattttgttgtttaaatttttttagtttttggtattgggggtttttttagttgatttttgtgttttttgatttattttttgtattgtgtgtatgtgtgtgtatgtgtggatttttttattttttggtattataagatgttatagatttattagatttattttgtatattttttgttttagtcgtagaattagttatttatttaaggaagtttgagattttttatttgaaattggtatagaaatgaagatttgggtgttaaataaattaggttttattttttagaattgtatataatatagtgtattttttttttatttggttttttttatttagtataattattttgagatttagttaaattatagtatgtattaatagttaattttttttattttttttatttatatattatagtttgtttatttatttaattgtggataaatatttgagttgtttttaatttttttggtattataaatagagttattatgaaaatgttgtataagtttttgtatgaatatgtgtttttattttttttgggtaaatatttagtagtgaaatggttggataaattagtaggtgttgtgatatgagtgtttgtgttttttttaaatttgtgtgttaaaatttaattattaatgtgatagttttagtaggaggaggtgttggggagtgattaggttatggagt

SEQ ID NO: 73 - DNA, 9021 bp, Artificial Sequence
  chemically treated genomic DNA (Homo sapiens)
tgtttagtttagggtttgtgaatgtacgaatcgatattttgtatttagttattttggtggggaggtggagaatttttgtgtttagtttagggattgtaaatatattaattagcgttttgttaaaatagattattcggttttattaattagtaggatgtgggtggggttagataaaagaataaaagtaggttgtttgagttagtagtggtaagttgtttgggtttttttttatattgtggaagttttgtttttttttgtaataaattttgttgttgtttattttttgggtttatattgtttttatgagttgtaatatttattacgaaggtttgtagttttattgttgaagttaatgagattacgaatttttcgggaggaatgaataatttgagacgcgttgttttaagagttgtaatatttatcgcgaaggtttgtagttttatttttgagttagcgagattataaatttattagaaggaagaaatttcgaatatatttgaatattagaaggaataaatttcggatacgttatttttaagaattgtaatatttatcgcgagggtttacggttttatttttgaagttagtgagattaagaatttattaatttcggatatattagttattagggaggttgaggtgaggggattatttgaatttaggaagtcgagggtgtagtgagtcgagattatgtcgttatattttagtttgagtgatagagtgagattttgtgttaaaaaaatagaataaaataaaataagaacgttgaataggttgtgtgttaattttgagatggagtttagatttaagaatgattttgaggtttagatttatatttaagaggatgattttagtttggtatttataggttttttaggtattttagatgtattttgttttgaattaagttttttgtttttgaatttgttttttttggtaaatagtattaagggggttagaaatttgggggttgtttttatttttttttttttattatgtatttttaatgggtggttggatttgtggttgtattttcgtgattttttagtttttttttagtgatggttttaggtgggtttttattttgttttttaaatggtttttttgttttgagttttattttatttgtttttagtttatttattgagttattttagagattattttgattttttgtggatatttttttggtggttttttttttttgttagttagaaattgtttttgattgtatgtaataaatgtggttacgttatttaattaaataaaggtttatttttttcgtgatgaaaagtatatagataagtagtttatttttatcgataattattgagggttttttatgatttttatagtaatgaaatgtgtatttatagtataaagatatataattttaaggttttaatataattgggtttaagtatagtattttttgttttagtttttaattgtttaggtgattttattgtgtagttagggttgataaatattgtatttaggtttagtgtttttgatttgtagttgaggtttagagagaattattgaaattgtagttttagttatttgggaggttgaggttggagaattgtttaagtttagcggggtgaggttgtagtgagttaagattgtattatcgtattttagttcgggcgatagagtaatattttatttaaaaaaaaaaaaatttttggtttatttttttgtttattttttaattatagaggtttttaaatatgaatttttatttttaggaaggttgaaatgatatattataagcggtttagttatttgtacgtgtcgttatttgatttaaggtatttatttttttttattatttttgataaagttgaattgtttatatgtgttatatttttttttttttttaattttttttttttttttttttttttttttttttttttttttttttttttttttttttttttttttttttttttttttttttttttttttttttttttttttttttattttttttttttttttttgatagggtttgtttgttttgtttttttaaattttggggtttaagtgtaaaggttttttttatttgatttttttattttattttatttaagttagatattttacgatgatgatgatgattattgttgagataggattttattttgttgtttaggttggagtgtaatggtgcgattataatttattgtagttttaattttttgggtttacgcgatttttttattttagttttttaagtagtttggattataggggtgtattattatgttcggttaattatatgtgttagatttaatttacgttttagggttttaaataattaaggttttattattttgttttaataaatatatttttataaagatttggaaggtaggttgaaatgtggaatttttggattttttttagttttacgtagaagggtagtagtggagagttggttgtttgttcgtttttggtttttttttttttttttatttttgttttttgtggtattgggtagggtttacgtttaaggttagtagtgtatttaataagggatagtttttgtgtggtttgtttaggattttatatataggtttagggttttttgggtaggaaattttaggattcgggtatttaagtggtgttttaaatagtggtttttggtcgggtgtggtggtttatatttgtaattttagtattttgggaggtcgaggttggtagattatttgaggttaggagttcgagattagtttggttaatatggtgaaattttatttttattaaaaatataaaaatttagttaggtatggtgtgtacgtttgtagttttagttattcgggaggttgaggtaggagaattatttgaatttagtaggcggaggttgtagtgagttgagattgtattattgtattttagtttggtgatagagtgagattttatattaaaataaatatataaataaataaaaatagtgatttttaattgggagtgatttggtaacgtttggaattatttttggttattttagtttggtagggagggatagggtattattggtatttagtgagtaggggttagggattttattgaatattttatagtgtataggatagtttttatagtaaagaattgtttggtttaaaatgtttatagtgtttatattcgatgttttgtattaggaagatataaatatttttaaatattatagagttaaattttttatttttgttttagtagagatgatatttttgcggggggagtatttttttggttttaatatatttttttttttatgggagatgatgttagaagagggatagaataggacgattattttacgaaggtattatttaggtattattagatcgttttaaaagaagagtaatttattgttttaaagtagttttttcgtgtttgtgggcggattttttggtaagtttataatgaattgaaatttgtcgaattttttggaatttaaagaaattttagttttgggtaaaggttttttggttagtatttgtattgtttatgtaatcgtttagaatatacgaattatttggagattattattaaatataataggtaaaattgtaaatatgtatattttttagaggatgataaaaaaatgtgaattgtatttttttgatagaggatgtattagagtttgagggtttaaatagcgtaaataataaataagtaaataaatcgatagtagtgtattttaaacgaggttggaatagtttttattgttgttttatattggattttaattaagttttagtattttgttatatttaatattaagtattaggttggacgtggtggtttatgtttgtaattttagtattttgggaggtcgaggtgggtagatggttggtttgagtttaggagtttgaaattagtttgggtaatatggtaaaattttatttgtatttaaaatataaaaattagttaggtgtggtggtatatgtttgtggttttaggtatttgggaggttgaggtaggaggatggtttgaatttaggaggtggaggttgtagtgagttatgatggcgttattgtattttagtttgggtgatagagcgagattttgttttaaaaattaaataaataattttttcgtttcggataaaagtagtttgtattatttttttattttataatatgtttttgaaatattttttttgaaaggtaagttatatttattatttttgttgtatggaggtattataaattattttattattttattttttttgagtgttgtggtttttaggttagataaaaacgtaggtgatgtttagaagttaattagttgtcgtttggttatttgtagggttgtggttttgttaaataggaaaaatataaaaagaatatcgaattttgttaattaaataagaaattttatattaaggattaagaaaattgtaggggaagaaaaggtaagtttcgggattgaggtgtagcgattttttatatttttagaaaattaaaaaataagataaaaaaatgaaaattataaaagtatttattttggggcgttttaattgttgagtaataaatgagacgttgtggttaaatttagttataattaatgatatttttagataaagtgattttagatttttaaagcgtattttgtttatattattttgttaatttcgcgtattgtaatcggcgggttacgttttcgtgaaaagaaggttgttttttttatatttcggggttttggacgtttttcggttgcggggcggggggagttttcggcgtacgcggttttttggtttcgtttttagttattttcggttattcgcgattcgaggttgtcgtagggggcgggttgagcgcgtgcgaggcgattggtttggggttagagtgggcgaggcgcggaggtttggtttataaagtagtcgcggagacggggtgttggtttgcgtcgtagttttttgtagcgtttggggttttcgttgtagttttcggaattaggatttcggcgtggtttagcgagttatggcgacgaaggtcgtgtgcgtgttgaagggcgacggtttagtgtagggtattattaatttcgagtagaaggtaagggttgggacggaggtttgtttgcgaggtcgtttttattcgttcgttttttcgcgtatttttgttaggagcgggtcgttcgttaggtttcggggtcgttttggtttagcgttcggtttcggttcgtgtcgttcggtcggtgttttcgtttttagcggtgcggtgtttaagtgttgagttatcgggcgggttcgggcgcggggcgtgggatcgaggtcgtcgcggggttgggtttgcgcgtggcgggagcgcggggagggattgtcgcgggtcggggaggggcgggggcgggcgtgttgttttttgtggtttttgggtcgtcgtcgcgggtttgtcgtggtgtttggagcggttgtgttcgttttttgtttggtcgtgttttcgtttttgagggtttcgcggatatcgagtggcgtagtgttaggtttagttcggggatggcgattgcgtttgggttcgtttggtgttttcgtattttttttcgtttttcggttttagcgttttaggttagggagttttcgtttttgtatagttttaaggttaggaatggtttttatatttttaaaaggttttggaaaataaaaatacgtaatagagatcgtttgtgtgatattttgtagggaagtttgttggtttttgttttaggttatgattgggttgtaagggtagagaaggtagttttgaatagaggttttttttttttttttaagtttcgggagttagaggtttaattgatttttttggggatttttgagggtagtgattttaattttgggtgtatagttagtttatttgaagattttattaaaaatatattagagtttaattttcgattaattatattaaaatttgttttagtgtagggtgagtattgttgttttttgaaagtttttaaaagtgattttgatgtgtatttacgattgagaattgtcgtttgaggatagtgggtggagtttcgtatttggaaattagaagatttggagtttttattatatcgaattggtatttaataattgttgtcggagtattttttaagttatattttcgtaaagtggttttaaaattgttttgttagtaggtaggttgttaagatggttagagataaatttttgaacgatttttgtaaaatatatagaaatatttttagaatttttattagtaaaattataaaacgtgttgtaaggaaggtgtttgtgataatattgtttttagaattttagtgaagttattaattggtggaaaatttttttttgtattcggtttaaaaattatgagggaatatttattatacgaatgagatttagtttttaaaggggtttatagaaacgtgagaggataggaatagttagtttgtgtaaatgtttgaaatatatgtgagggagataatgagtttagtttttttttttaataggtttttagattttttggaaaaggttttttggtatttgattttattttgttgttttatttgttagatttttttttgtttttttttatttttttttatataatttattagtattagtgttttgttttttagattaagtttcgttttgtcgtttaggttggagtgtagtggcgcgattttagtttattgtaattttcgttttttaggtttaagtaatttttttgttttagtttttcgggtagttgggattataggcgcgcgtcgttacgtttggttaattttttatattttagtagagacggcgttttattatgttggttaggatggtttcgatttgttgacgtcgtgatttattcgtttcggttttttaaagtgttgggattataggcgtgagttatttcgttcggttattagtgttatttttaagacgtttttgaggaattttttttttttggttattgagaatttatgtatgaatttaggttttttattttttttgagtagtttgtatagtttttttttttaagcgtttgatttcgttttgtttggtgttcgttgtatttgagaatgagttttggatagtggagtattttagttttttagatatgtagagataatatattggttattagttatttggtttggtttatttcgtgtttaaaattttggattttttgttagtttttatagattagaattttttacgtattaatttagtttttttagttttttttgaagaatttttggagatttttttatattgagtttttattagtttaggatagtattgttgtagtagtttatatattttttcgttttttaggtttgtgttatttatttaagtttatagtttggtttttgtagggttgtattcgagtatagttatttagatgttttgaatgtattatcggttaaatggaggttttaaagaatttgttgtttttggttttgtgtttttgataatagagtgtttgagggataatttttatatttgagtttttttaaaattaaaggttgtagaagagttatagtatttattgttaaaaagaaaagaatttaaaaaggtagtaattgttaggatattttatttgagtaatgatattttttagtggaaagttatattttaagggttaatgttttttaattgttggtcgtatttgaaaataaattaagttaaaaataagagatattgatatgttgtatgacggtgtggtgtggatgttgtgtttattttagttttgagatttagttgtaatttttttgatttttgtatgtagttacggagtattattatttgttattattatttgaatggttatattgtttgtttttattttggtagagtggaaaggttatttaggttttagtgtttgaaaagattttagaaagtagtagtacgtttggttagattagaattagtttttttttgggggtagtggaatataatattttttgattgttaattaaaaatatttgtgatagtcgggcgtggtggtttacgtttgtaattttagtattttgggaggtcgagacgggtggattacgaggttagtagatggagattattttggttaatacggtgaaatttcgtttttattaaaaatgtaaaaaaattagtcgggtgtggtggtgggcgtttgtagttttagttatttaggaggttgaggtaggagaatggtatgaatttgggaggcggagtttgtagtgagtcgagattatgttattgtattttagtttgggcgatagagcgagattcgttttaaaaaaaaaaagaaaaaaatttatgatggatatttaaaaatatttattgagtggggagtggagagtaggggttttagggtagtttgttggatatttttagggcgattttttttttttttttttttaaagttaagtgagtatgttatatggaaaagggtgtgcgtggagaaaaagtaaggggttttagagtgtaggatgagatatatattttttgggttaaaaaggttgaggtaggagaatggcgtgaattcgggaggcggagtttgtagtgagttgagattatgttattgtattttagtttgggcgatagagcgagatttttgttttaaaataaaaaacgtttatatgtatatgtatatttaatatgtataaatataatttatttaaaagtatttattatataaataggtatttatattatttatttattgtaatagttaaagtttatgaagtatttaatattgatgtgtaggtatttattttgtttgttattttattaggtgttttttatgttatttaattatgaagtttggttatagggtgtttgtgtattgagtgtgggaataagattattattttttttttgaggatataggtttagagtagttaagtagtttgttggaggtttattggttagaaagtggttagtttgggatttggatatagatttttttatttttaagtttggttgttttttattttattgtgaggggtaaaggtaaattagttgttttttttgtttagaaattttttttaattttgtattttttttaaagg

SEQ ID NO: 74 - DNA, 9021 bp, Artificial Sequence
  chemically treated genomic DNA (Homo sapiens)
tttttaagaaaagtgtaaagttggagagagtttttgaataaagaaaatagttgatttatttttattttttatagtgaagtaaaaagtagttagatttgggagtggaaaaatttgtgtttaaattttaggttgattattttttagttagtgaatttttagtaagttgtttaattgttttaggtttgtgtttttaaaagggagatggtaattttgtttttatatttaatgtataagtattttgtggttaggttttatgattaaataatataaaaagtatttaatagagtggtaagtaaagtgagtatttatatattagtgttagatattttataggttttgattattatagtaaataggtaatgtaagtatttatttatgtagtaaatatttttgaataggttatatttgtatatgttgaatatatatgtatatgtaaacgttttttattttgagataagagtttcgttttgtcgtttaggttggagtgtagtggtatgattttagtttattgtaagtttcgtttttcgggtttacgttatttttttgttttagtttttttaatttaaaaggtgtatgttttattttatattttggagttttttgttttttttttacgtatatttttttttatatggtatatttatttgattttaaaaaaaaaaaaagaaaaagtcgttttggaaatgtttaataggttattttgggatttttgttttttattttttatttagtgagtgtttttaagtgtttattataagtttttttttttttttttttgagacgagtttcgttttgtcgtttaggttggagtgtagtgatatgatttcggtttattgtaagtttcgttttttaggtttatgttatttttttgttttagttttttgagtagttgggattataggcgtttattattatattcggttaatttttttgtatttttagtagagacggggttttatcgtgttagttaggatggtttttatttgttgatttcgtgatttattcgtttcggttttttaaagtgttgggattataggcgtaagttattacgttcggttattataggtatttttaattagtagttagaaaatattatattttattgtttttaggagaggattgattttagtttaattagacgtattattgttttttgaaatttttttaagtattgaaatttaggtaatttttttattttattaaaatgaaagtaagtagtatagttatttaggtaatggtgataggtaatggtgtttcgtggttatatatagaaattaaggaagttataattagattttaggattaaaataaatataatatttatattatatcgttatataatatgttagtgttttttgtttttagtttggtttgtttttaaatacggttaatagttaaggggtattaatttttaagatgtgattttttattggaaaatattattgtttaaatgaagtattttggtaattgttgtttttttaaatttttttttttttgataatagatattgtgatttttttataatttttaattttggaaaaatttaaatgtgaaagttgttttttaaatattttgttattaagagtatagggttaaaaatagtaggttttttgaaatttttatttaatcggtaatatatttaggatatttaagtagttgtgttcgggtataattttgtagggattaggttatgaatttaagtgaataatataggtttgggaagcgaaaaaatatatgaattgttatagtagtattgttttgggttaatgaaggtttagtatgaagagatttttaaaaattttttaagagaagttaggaaaattggattaatacgtgaaaaattttgatttgtaaaaattagtaaagagtttaagattttaaatacggaataggttaagttaagtagttgatagttaatgtattatttttgtatatttggaaagttggaatgttttattatttaaggtttatttttaggtataacgggtattaaataaaacgaagttaggcgtttaaaagaaggaattatgtaagttgtttagggaaggtggaaaatttgggtttatgtatggatttttaatggttagggagaagggattttttagaggcgttttaagaatagtattggtggtcgggcggggtggtttacgtttgtaattttagtattttgggaggtcgaggcgggtggattacgacgttaatagatcgagattattttggttaatatggtgaaacgtcgtttttattaaaatataaaaaattagttaggcgtggcggcgcgcgtttgtagttttagttattcgggaggttgaggtaggagaattgtttgaatttgggaggcggaggttgtagtgagttgagatcgcgttattgtattttagtttgggcgatagagcgagatttggtttgaaaaataaaatattagtattggtgaattatgtggggagaagtaaagagggataaaaagaagtttgataaatgaaatagtaaaatggagttaaatgttaaagaattttttttagaaaatttggagatttattaaagaaaaaggttaaatttattattttttttatatatattttagatatttatatagattaattgtttttgtttttttacgtttttgtaaatttttttaaagattgaattttattcgtatagtaaatatttttttatgatttttaagtcgagtgtaagagaaaattttttattagttggtaattttattaaggttttggggatagtgttattataagtattttttttgtaatacgttttgtaattttattgataaaagttttgaaaatatttttgtatattttataagagtcgtttagaagtttgtttttgattattttagtaatttgtttattggtagagtaattttaaagttattttacgaaaatgtggtttaagaaatgtttcgataatagttattaagtgttaattcggtgtaatggaaattttaggttttttaatttttaaatacgaaattttatttattgtttttaaacgatagtttttaatcgtaggtgtatattaaaattatttttggaaatttttaaaaaatagtaatatttattttgtattaggataggttttgatgtaattggtcggaggttgggttttggtgtatttttagtaagatttttaaataagttaattgtgtatttaaagttaagattattgtttttaaaaatttttaaaagggttagttaaatttttggttttcggagtttaggaggaggaaaaggatttttgtttaaggttattttttttgtttttgtagtttaattatgatttagaatagaggttagtaaatttttttgtaaagtgttatataaacggtttttgttgcgtatttttgttttttaaagttttttaaaaatataaaaattatttttagttttagagttgtataaaagcgaagattttttgatttagagcgttgaagtcggaaagcggagagggatgcgaagatattaggcgggtttaggcgtagtcgttattttcgggttgggtttggtattgcgttattcggtgttcgcgggatttttaggaacgagaatacggttaagtaagggacgagtatagtcgttttaggtattacgatagattcgcggcggcggtttaaggattatagagggtagtacgttcgttttcgttttttttcggttcgcggtaattttttttcgcgttttcgttacgcgtaggtttagtttcgcggcggtttcggttttacgtttcgcgttcgggttcgttcggtgatttagtatttgggtatcgtatcgttgggggcgaaggtatcgatcgggcggtacgggtcgggatcgggcgttggattagggcggtttcgaggtttggcgggcgattcgtttttagtaaaggtgcgcggggggacgagcgggtgggagcggtttcgtaaataagttttcgttttagtttttgttttttgttcgaaattgatgatgttttgtattgggtcgtcgttttttagtacgtatacggttttcgtcgttataattcgttaggttacgtcgaggttttggtttcgaggattgtaacggaaattttagacgttgtaggagattacgacgtaaattagtatttcgttttcgcgattattttataggttagattttcgcgtttcgtttattttggttttaaattaatcgtttcgtacgcgtttagttcgttttttgcggtagtttcgggtcgcgagtggtcgggaatgattgggggcggggttaaggggtcgcgtgcgtcggagatttttttcgtttcgtagtcgggaaacgtttagaatttcgaaatgtggagaaaataattttttttttacgggggcgtggttcgtcggttgtagtacgcgaaattggtaaaatgatgtaaatagggtacgttttgaaaatttgaagttattttgtttagaaatgttattagttatgattgagtttggttatagcgttttatttgttatttagtaattgggacgttttaagatggatgtttttgtagtttttatttttttgttttgttttttagttttttgagggtatagaaagtcgttatattttaatttcgggatttattttttttttttttgtaatttttttagtttttagtatagagttttttatttggttggtagaattcggtattttttttatattttttttgtttggtaaggttataattttatagataattaaacggtaattagttggtttttaggtattatttgcgtttttgtttggtttaaaggttataatatttaaggagggtagaatggtgaaataatttatgatgtttttatataataggaatgataaatatgatttattttttaagggaaatattttaaaaatatattgtgaaatgagaaaatagtgtaaattatttttgttcggggcgagggggttgtttgtttgatttttgagatagggtttcgttttgttatttaggttggagtgtagtggcgttattatagtttattgtagtttttattttttgggtttaagttatttttttgttttagttttttaagtatttgggattataggtatgtgttattatatttggttgatttttgtattttgggtatagatggggttttattatgttgtttaggttggttttaaatttttgagtttaagttagttatttatttatttcggttttttaaagtgttgggattatagatatgagttattacgtttagtttagtatttaatattgagtatggtaaaatattgagatttaattgaagtttagtgtgaaataataatagaagttattttagtttcgtttggagtatattattatcgatttatttatttatttattatttacgttatttagatttttagattttaatgtattttttattagagaaatataatttatatttttttattattttttaggaagtatatatatttgtagttttgtttgttgtatttggtagtagtttttagataattcgtatattttaaacggttgtataaatagtgtaaatgttggttaaagggtttttgtttaaggttaaagtttttttgggttttaggaagttcggtagattttagtttattgtaaatttgttaagggattcgtttatagatacgagagagttgttttgggatagtgaattattttttttttgagacggtttaatgatgtttgggtggtgttttcgtaggatggtcgttttgttttgttttttttttggtattattttttatggagaaaagaatgtgttgaagttaagaagatgtttttttcgtaagaatattatttttgttagaataggggtaaggaatttaattttgtgatatttaagagtatttatatttttttaatgtagggtatcgaatgtgggtattatggatattttgggttagatagttttttgttgtggaggttgttttgtatattgtaggatgtttagtagaatttttagtttttatttattagatgttagtaatattttgtttttttttgttaggttgggataattaaaaataattttagacgttgttaaattatttttagttaagaattattgtttttatttatttatgtatttattttgatatggagttttattttgttattaggttggagtgtagtggtgtaattttagtttattgtaattttcgtttgttgggtttaagtgatttttttgttttagtttttcgagtagttgggattataggcgtgtatattatgtttggttaagtttttgtatttttagtagagatggggttttattatgttggttaggttggtttcgaatttttgattttaagtgatttgttagtttcggttttttaaagtgttgggattataggtgtgagttattatattcggttaagaattattgtttagaatattatttgagtattcggattttggaattttttgtttaaagagttttgagtttgtgtataggattttgaataggttatatagggattgttttttgttgagtatattgttagttttgaacgtaggttttgtttagtgttataaggagtaggggtggggaaaggaggaaaggttaggggcgggtaggtagttagttttttattgttatttttttacgtagaattgaaagaagtttaagaattttatattttaatttgttttttaggtttttatgaaggtatatttgttaagataggatgatagagttttggttgtttggaattttggaacgtgggttgaatttggtatatgtaattagtcgggtatggtggtatatttttgtagtttaagttatttgggaggttgaggtaggaggatcgcgtgggtttaggaggttgaggttgtagtgagttgtgatcgtattattgtattttagtttgggtaatagaatgaaattttgttttaataataattattattattatcgtggagtatttaatttaaataaaataaaatagggaaattagatgagagggatttttgtatttgaattttagggtttaaagaagtagaataggtaaattttgttagaaagaagaaaagagagtgagagagaaagagaaagaaagagaaagagagaaagaaaaagaaagagaaagaagaaggaaggagggagggagggaagaaagggaggagggaaggagggaaggaattagagaaagaggagaatgtggtatatgtagatagtttaattttgttaggaatggtgaggaggaatagatgttttaaattagatggcggtacgtgtagatgattaaatcgtttgtaatgtgttattttagtttttttgagagtgaaaatttatgtttggggatttttgtggttaaaaggtgggtaaaaaggtagattagaaatttttttttttttagatggagtgttgttttgtcgttcgggttggagtgcggtggtgtagttttgatttattatagttttatttcgttgggtttaggtaattttttaattttagttttttaagtagttgggattgtagttttaataattttttttagattttagttgtaaattaaaggtattgggtttagatgtagtgtttattaattttggttgtataatagaattatttgggtagttgaaaattaaaataaaaaatattgtgtttaggtttaattatattaaaattttaaaattgtatatttttatattgtaaatatatattttattgttgtaagagttataagaaatttttaatggttatcgatggaagtaggttgtttatttgtgtattttttattacgagaaaaataaatttttatttggttaaatagcgtaattatatttgttatatgtagttaaaagtaatttttaattgatagagaggagaagttattagaggggtgtttatagggagttagaatggtttttggaatagtttagtgggtggattgagagtagatggggtgagatttaaggtagagaggttatttgggagataggataagagtttatttaaggttattattggaagaaagttgggagattacggaaatgtaattataagtttagttatttattagaggtgtatggtgagagagggaaggtaagggtagtttttaggtttttagtttttttggtgttgtttattaaggaaagtaggtttaaggataaagggtttaatttaggatagggtgtatttgaagtgtttgaagaatttataagtgttaggttggaattatttttttggatatgggtttaagttttaggattatttttaagtttggattttattttagaattaatatatagtttatttaacgtttttgttttattttgttttgtttttttgatataagattttattttgttatttaggttggagtgtaacggtatgatttcggtttattgtattttcgattttttggatttaggtgatttttttattttagtttttttagtagttggtgtgttcggaattggtgggtttttggttttattgattttaagaatgaagtcgtggattttcgcggtgagtgttatagtttttaaaggtggcgtgttcggagtttgttttttttgatgtttagatgtgttcggagttttttttttttggtgggtttgtggtttcgttggtttaggagtgaagttgtagattttcgcggtgagtgttatagtttttaaggtagcgcgttttaagttgtttatttttttcggggggttcgtggttttattggttttagtagtgaagttgtagattttcgtggtgagtgttatagtttataaaggtagtgtggatttaaagagtgagtagtagtaagatttattgtaaagaaagataaagtttttatagtatggaaggggatttaagtagtttgttattgttggtttaggtagtttgtttttatttttttatttggttttatttatattttgttgattggtagagtcgagtggtttgttttgatagggcgttgattggtgtgtttataatttttgagttagatataaaggttttttatttttttattagagtagttagatatagagtgtcgattcgtgtatttataaattttgagttagata

SEQ ID NO: 75 - DNA, 6074 bp, Artificial Sequence
  chemically treated genomic DNA (Homo sapiens)
ttttagttttttatagttttttgatttttttttttttgattttttatatttttttttttttattttttttttgtttttgttaattattattattttatttttattaatattattaagtgtatttgtttgagtatttttgggtgtttgatttaggatttttttaggggtatttttgttggggtaatttttttagtttttagaagggtatggttgtgtggttgagattgttgaggaaagtagtaaagataggaggatagaattgaatgtaaagttattttgtttttaagtacgtttaatggaatggttttatagtagttgcgtttaattttgtgggtattgttattgtattttgtcgtttaggaagtttataaattatataatgttttttacgtggtagttatttggtggttttgagttttagagattttgatttagtattttgattaggatatggagttgtttggattattagtggaatattaatttttatattttaatattgggttttagagttattttgtgaaattttttttggaaaggaaagatttgagttttaattttaattttaatgtgtattttaaacgtaggtttgagagttgggggatggtagatgttaagtagaaggttagattaatttttggataatattggtaacgaaaattacgtaggtagttgagaataaagtaaatgttttttatttttttttatttcgtttattatgttggtgatgaaaattgtaaaaatgagtttagtataaggttttttatttttttttttggtaagagataaggaatatattaatagttaaggttttagagggagttgatatttagataatagatttttttttttaaattttttaatatattaaaatttttttattttttttaaatatagttttttagagtttttaataaaattttttttttttttttttatatatagatgatattttttttttgttttttttttgtattaggtgttttattttgttttttttttgagtttggttgtttgttgttgttatttaggaaggttttgtagttatttgaattagtttagttattgttttttggggtttgattgtgggaattgtaatttttttaatgttgggtttatggttgtgtttttttttaaagaatgtttgggttgtttaatttttagtattttgggtaattgttgatttaaaatagtaagtttagttggtttgaattatttagggaaggttttggtgtttatagttttataattatttttataaatgaattaggaaggaaggggaggttgattatagtgaagaagagggttttttaaatatattttttataataagtatgtaggagaaaggaaagggaaaattgatagggcggtttatcggtttttagtagagtataatatagtttttttgtttgtatagggaggagaggttgtgattggttttttatagaagagattatattgagtttaaggttagttgtagtaagtgtgtgtaaaggtagtttaggtagatttttagtgggaaggttatataattattaggttttacgtgtagagaaataggagttgtagtggttacgcgagatagatgtagtgtttgtaggtgaaggcgtatatttgagtttttatatagttttaaggggttatagttggaattttattcggtttagagagtgaggtgttttaatataaaatgttatattattttttaggaaaaatgattgttttgttttaaatcgcgttttgttaattttttttttattttttttatattatagttgagaaataattttatattttttgatttatttatgaaaatattttttataggaagaggtatgtacgtgtatgtatatgtatatgtttaagtaaagaagttgatatgaaaatgataatataaagatagtggtaaggaattaagataagggaaaggtgtgtttattgagggagtttttttttaaataataggtagttttgttgatgttaaatattatgttaagtatgtaaataaatttttgtatttagtatttatattaatttaatgagttaagtattatttttattgaaaatgtggaaatcgaggtagtatagtagagaagttagtatataagttttagaattagtttgttttgtttttaaaattaagttttgttttttattggttgtgtaattttgggtaagttattaaatttatttagttttgattttttttttataaaaggggatgggatttattttataagattattgtgaggattaaatgagatatataaaatataaaagatagagtattaataatttaggatattaggttttttttatgattaaacgtttaaaaattattttaatttagtttattaaaaaaatgatttttaagttaaaaaaaaaaaaaaaaatatttagtttttgatgatttgtttgatttgaatgaattggagggttataaaattatagatatggattagtttttgaaaattttggagggagaattaatgatttttaagtattagaatgtattttgatttggatattttttagtttgtaagatggtaagttatttttttttttttttttttttttttttttttttttttgagacggagtttcgttttgtcgtttaggttggagtgtagtggcgggatttcggtttattgtaagtttcgtttttcgggtttacgttatttttttgttttagttttttaagtagttgggattataggcgttcgttattacgttcggttaattttttttgtatttttagtagagacggggttttatcgttttagtcgggatggtttcgattttttgatttcgtgattcgttcgtttcggttttttaaagtgttgggattataggcgtgagttatcgcgttcggttattttttttttttttttttttttttttttgagatagagttttgttttgttatttaggttggagtgtagtggtataattttggtttattgtaatttttgttttttaggtttaagtgattttcgtgttttagttttttaagtagttgggattatagacgtacgttattatgtttggttaattttttgtatgtttagtagaaatggggggttttattatgttgtttaggttggtttcgaatttttgagtttaagtaatttatttattttagttttttaaagtgatggtattataggtgtgagttattatgtttggtttgtaagttattttttgatttaaaatattttttaattatgaaggaaattgatttgattttgttatttttttttatttttgattttgggggtaggggatagataagtagaaattgttgaatatgatttttagtcggttgggtagttattttttagttatagtgagtttgatttgcgtgttttagtaggaagtaaggagttaggtttttttttagttttggggaataggagaagggtgggggaatttttgatttttttttttttgtagttaaagtagattagtttagggaggagatagggaaattattagagtaggttaagattaatttgaaggaagtgggagttagggataatttattaaaggaagtgtatgtgtgttttgtatatgtatggggtggattaaggaaaagatttattttaaaagaataaagtatgtttcgataaatttattgaaaggaatgatttatattggtgttttttgtttaaatgttgagattaatggtttggtgttttttttttgaaattaggttgttttatttatatgaaataaattgggtagaggttaatcgtgagagtttgagtttttttaagtaaatagtaaaagattttttaggtttaatagtttttatttttatttttaaggaaagtggatttattcggagtacgtaggttagaggaggtaggagaagagggttagttcgtgagtttcgggtatttggagaatatgaatttttcgggtgtattgtttttatgagggttatcgaggaatttatggattttttatttttcgtttagaatgttttttttttattttttttatttttttaaattttagtattaggggttattttagagttataaattttgaaaggattatttaggtgattcgggtttatatatttttttttcggggtatatttggtggtaggttagtaggtttttggttttagttggtggtgttatataattagattcgttatagagatttattttttattagttttaggttagaagtacgaagattgattttaacgatgtggtttgtttgggaggtaaggcggtaggcgttgttagaattgatgggaattgtggtataggtgggaaatttggtttaataaattttttattgatttaggggattattttttttgagttaagttttggtaagcggtcggcgaaatttataggttttttttttggttgcgtttttagtttttagtttttttcgttttagagatgttttaggagcggtttttcggtgtaggtaacgggtgttcgggcggtttcgtttcgtcgtttagagtttggaagtcgttattgcggtttaggataattcggttacgcggtcggcgtcgatttcgtacgttggagttcgttgtcgtacggcgttggtagtcgggggtggtgtttgaagttaggcgttttttgttttttcgtcggttcgggtgttcggttcgcgtcgttaggttttgggattttaggtcgtttcgtttagtagttcgcgttttgttcggtgcgtttagcgttttcgttttttattttaaatttttattttttgtgtttttaggggggtatttttatcggggcgggaggggggggttagttgtgtttcggtcgtcgagtggcgaggaggtgacggtagtcgtttttttattttcgttcggcgggtagcgttgcggggcgagtgttagtagagaggcgttcggtttttttttcgttttttcgcgtcgggggtaggttttgtttagtttgcgtttttttttttcgtatcgcggcgtcgtttcgttattcgggtatcgtaggtagggtaggaggttggagagtttgttgttcgttcgttcgtaaaatggttttttcggttggatagttcgttttgttcgttttgggtacgtacgtcggttgcggcgttttttgcgtcgcgcgatattttgtttttttcggttttcgtcgagttttttttttcgggggtttttgcgttcgtttgggagagtggagagaagcgagtagttttaatgggttggcgtttgggaggtaaggggagttattaagaatgataaagaggggattgttcggtcgagcgtcgaggttttttcgggaaagtggttgtttgggtcgtgcgtgagaatatttgggaaggggaagcggagtgtgaacgggtttgaattttaattcgtcgtagttgtgtgtttgtttagatatatgtttatatttatttgtttatttggttgtttttaagttcggtttagtcggcgtcgttggcgtgtagattgggtcgtttcggaacgggggtcggcgtttaattttttggtcgggttttgtttgcgtttttttggtattttttgtttatttttaagttttagcgacgagtagagatgtttaagatcggtagaggcgttttcgatttttttttagagtttttgagttttgggggtaggttttggatttttgggcggattaatggtttttttaattaatttttttgggagaagtggtttcggtgttcgtcgagggtaggagcgaaattttagatcgagtgttgttagttttttttgagtatgtttttggaaatgaaggagggatgggaaaggtgaggggaagttaaatttttttttcgggtcgggtttgcggagcggtgcgttttttggcggtgaagtttaagggtttgtttggacgcggtgagggcgtagcgtcgcgcgttttttggttaatttttgttttttgtgttggtgggtttttttggtgttgagatagttgattaatagcgtaggtgttttggttattgttagtttttcgtgaagtgaattgttcgttcgatatgtttcgagtttaattcgtatagtatgcggttcgttgtagggtggttagagtttgtggaaagttatggaattt

SEQ ID NO: 76 - DNA, 6074 bp, Artificial Sequence
  chemically treated genomic DNA (Homo sapiens)
gagttttatggttttttatagattttaattattttgtagcgagtcgtatgttatacgggttaaattcggggtatatcgaacgaataatttattttacggaagattagtaataattaggatatttgcgttattgattagttattttaatattagagagatttattagtataaggggtaagaattggttaggaggcgcgcggcgttgcgtttttatcgcgtttagatagatttttgaattttatcgttaaaaaacgtatcgtttcgtagattcgattcgggagaggggtttaatttttttttattttttttattttttttttatttttaaggatatatttaaaggaaattggtaatattcggtttagggtttcgtttttgttttcggcggatatcgaaattattttttttagggaagttaattaaaggaattattaattcgtttaaaaatttaaaatttatttttaaagtttaagagttttgaaaagagatcgagggcgtttttgtcgattttgaatatttttgttcgtcgttggggtttagaggtgggtagggggtgttaaaggggcgtaggtaagattcggttagagggttagacgtcggttttcgtttcgaggcggtttagtttatacgttagcgacgtcggttgagtcgggtttggaggtagttaggtaagtaggtaggtgtaggtatgtgtttgagtagatatatagttgcggcggattaaagtttaagttcgtttatatttcgttttttttttttaggtgtttttacgtacggtttaggtagttattttttcggggaagtttcggcgttcgatcggatagttttttttttgttatttttaatgattttttttgttttttaggcgttaatttattgagattattcgtttttttttatttttttaggcgggcgtagaaattttcggaaaggggaattcggcggggatcgggggaagtagggtgtcgcgcggcgtagggggcgtcgtagtcggcgtacgtatttagagcgaatagggcgagttgtttagtcgaggggattattttacgggcgggcgggtagtaggttttttagttttttgttttatttgcggtgttcgagtggcggagcggcgtcgcggtgcgggggaaaaagacgtagattaggtagggtttgttttcggcgcgggagggcggagggaggatcgagcgtttttttgttggtattcgtttcgtagcgttgttcgtcgggcggaaataggaaggcggttatcgttattttttcgttattcggcgatcggggtatagttgatttttttttttcgtttcgatgggggtgtttttttgagggtatagagggtgggggtttggggtaaggggcggggacgttgagcgtatcgagtagggcgcgggttgttgggcggggcgatttgggattttagagtttggcggcgcgagtcgggtattcgggtcgacgaaaaggtaggaagcgtttgattttagatattattttcgattgttagcgtcgtgcggtagcggattttagcgtgcggggtcggcgtcggtcgcgtagtcggattgttttgggtcgtagtggcggtttttaggttttaggcggcggagcggagtcgttcgggtattcgttatttatatcgaggggtcgtttttggggtatttttggggcggggaaggttggaggttggggacgtagttaggaaagggatttgtgagtttcgtcggtcgtttgttaagatttggtttaaggaaagtggttttttgaattaatgaagaatttgttaaattaggttttttatttgtgttatagtttttattaattttggtaacgtttgtcgttttattttttaggtaggttatatcgttaagattagttttcgtatttttggtttgggattgataaaaaatgggtttttgtgacgaatttggttatatggtattattagttgaggttaaaagtttgttagtttgttattaagtgtatttcgaaagaggggtgtgtgggttcgagttatttgggtggtttttttaggatttgtggttttgaggtggtttttggtgttggaatttggggaggtggaggggatagagggaagatattttgggcgaagagtggaagatttataggtttttcggtgatttttatggggatagtatattcgggagatttatgttttttaggtattcggagtttacggattgattttttttttttgttttttttggtttacgtgtttcgggtagatttattttttttgaaggtgggggtgggggttgttgggtttggggaattttttgttgtttatttggggaggtttaggtttttacggttgatttttgtttagtttgttttatgtaagtagagtaatttagttttaagaaggaagtattaggttattggttttaatatttgggtaggaagtattagtgtaaattattttttttaatagatttgtcggagtatattttgtttttttagggtaaattttttttttggtttattttatgtatgtataaggtatatatgtattttttttagtaggttgtttttgatttttattttttttaggttgattttgatttgttttggtggtttttttgttttttttttaaattagtttgttttggttatagaaggggaggaattaggggtttttttattttttttttgttttttaggattagagaaggatttgattttttgttttttattggaatacgtaaattaagtttattgtggttgagggatggttgtttagtcggttgagggttatgtttagtagtttttgtttatttgttttttatttttaaagttagaggtggagggaagtagtagaattaagttaattttttttatgattggaaaatattttaaattaagaggtaatttgtaggttaggtatggtggtttatatttgtaatattattattttgggaggttgaggtgggtggattgtttgagtttaggagttcgagattagtttgggtaatatggtaaaattttttatttttattaaatatataaaaaattagttagatatggtggcgtgcgtttgtagttttagttatttgggaggttgaggtacgagaattatttgaatttgggaggtagaggttgtagtgagttaagattgtgttattgtattttagtttggatgatagaataagattttgttttaaaaaaaaaaaaaaaagaaaaaaagagatggtcgggcgcggtggtttacgtttgtaattttagtattttgggaggtcgaggcgggcggattacgaggttaggagatcgagattatttcggttaaaacggtgaaatttcgtttttattaaaaatataaaaaaaattagtcgggcgtagtggcgggcgtttgtagttttagttatttgggaggttgaggtaggagaatggcgtgaattcgggaggcggagtttgtagtgagtcgagatttcgttattgtattttagtttgggcgatagagcgagatttcgttttaaaaaaaaaaaaaaaaaaaaaaaaagaaaaaaagagataatttgttattttataaattaaagagtatttaaattaaagtatattttaatgtttgaaaattattaattttttttttaagatttttaaaagttggtttatatttgtggttttataattttttaatttatttaagttaaataggttattaggggttgggtgtttttttttttttttttaatttaaagattatttttttggtaaattgaattgaaatgatttttaaacgtttagttatagaggaaatttaatattttaaattgttgatgttttattttttgtattttatatattttatttaatttttataataattttatgagatagattttatttttttttataagagaagaattaagattgagtgaatttagtaatttatttagaattatatagttaataaagggtagagtttgattttgaaagtagaataagttggttttgaggtttatgtgttggtttttttgttatattgtttcggtttttatatttttaataaggataatgtttaatttattgggttgatgtgagtattaaatgtaagaatttatttgtatatttagtataatatttgatattaataaaattatttattatttaaaggaaaatttttttagtggatatattttttttttgttttagttttttattattatttttatgttattatttttatattagtttttttgtttgagtatatgtatgtatatgtacgtgtatatttttttttatgggaaatatttttataggtgaattaggaggtatgaagttgttttttagttgtggtgtgaaagaaataagaaaaaaattgatagaacgcgatttagagtaaagtaattattttttttaaagggtggtgtgatattttgtattggaatattttattttttgagtcgagtgaaattttaattgtagttttttgaagttgtgtggagatttaggtatgcgtttttatttatagatattgtatttgtttcgcgtggttattgtagtttttgtttttttgtacgtggagtttgatgattatgtggtttttttattaagagtttgtttggattgtttttgtatatatttgttgtagttggttttgagtttagtataattttttttgtgagaagttaattatagttttttttttttgtgtaaataagagaattatgttatgttttattgagagtcggtaaatcgttttgttagttttttttttttttttttttatatgtttattatagagggtatgtttaaagagtttttttttttattgtgattagttttttttttttttttgatttatttgtggaagtgattgtggagttatgagtattagagttttttttgaataatttaggttagttgagtttgttgttttagattagtagttatttaagatattggggattgaatagtttagatattttttgggaggaagtatagttatgggtttagtattgaaggaattataatttttatagttaagttttagggagtagtaattgggttggtttaggtggttgtaggatttttttgggtgatagtagtagatagttaggtttagagggaaaataggatggggtatttggtgtagagggagggtaaaggagagatgttatttgtgtatgagaaagaaagagggaagttttattaaggattttggagaattgtgtttagggagagtgaggagattttaatgtgttaagggatttagaaaaagaaatttattgtttaaatattagttttttttggggttttagttattagtgtgttttttattttttgttaaaggaaaaagtaggaaattttatgttgggtttatttttatagtttttattattagtataatgggcgaggtaagaagagataagaggtatttgttttgtttttagttatttgcgtgattttcgttgttagtgttgtttaaagattggtttgattttttgtttaatatttgttattttttagtttttaggtttacgtttggaatgtatattgaagttgaaattgaagtttaaattttttttttttagaggagattttatagaatggttttaaagtttagtattgaagtgtggaggttggtgttttattagtggtttaagtagttttatgttttagttaaggtgttaggttagagtttttgggatttagggttattaggtggttattacgtgaaagatattatatagtttgtgaattttttagacgataggatgtagtagtagtatttataggattgagcgtagttgttgtgaagttattttattaagcgtgtttggaggtaggatagttttgtatttaattttgtttttttatttttgttattttttttagtagttttaattatatagttatatttttttggagattggaaagattgttttagtaggagtgtttttgggaaagttttaaattaagtatttagaaatatttaggtaagtatatttaatgatgttgatggaaatagggtagtgatgattaatagaagtaaaagagagataggagaaagaaaatatgaagaattaaggaaggagaaattaaagaattatagagagttgaaa

SEQ ID NO: 77 - DNA, 2205 bp, Artificial Sequence
  chemically treated genomic DNA (Homo sapiens)
ggatttttagtaggggagtaatatggatttggaaagattattttggttgttgtgtggggatagataagacggtgggagtttagaaaggaggttgggttggaaattttgggatagaaatttagagaggaaaagattgggtttggggtttttagtgagtattagggagtggggaattagtaggagtttggtttttatttatttttttttttttttttttttttttttttgtaggttggtttcggttttatttttaggtgtggttttaggatagttttggtcgttgttagtttgtaggttatggattttgttatgtgtttagtagttcgggtatttattagttggtttgttttacgtggcggtttttgggtagttggcgagaatagttggtacgggttttcgtgggtggtgggtcgtagttgttgtatggggatattatttatagtggggtcgatcgttatcgtttgtatatagttgttggtggtatcgtgtatttggagatcggtttgttgtttcgtaatttcgatcgttacggcgtggagtgttgagggattttgtttttaacgttattattatttatatttcggatatttagtgatgggggaggatggtatagtggttaagagtatagattttagagattgttagagttgattttagttaaggtatggtatcgtttttgttttttttaggatttcggggtttttttgggtttagtttttttatttgtaaattggggatagtaaatgtatggggtcgtagggtgttgagtgataggaggttgtttagttatatgggaggtgtttagtaaaggagagtaatttttataggtgtttgttttttgatttttttattttttaggtgttttgttgttttttttttttattgatatttttcggaggtttttatgttgatagatttttttttttttattttgttttttagtttgatttttttttcgttttgggttttttttttttggtcggtttttttgtgttttatttttcggattaagtttttttcgtttggttttttttttttggtgatttatatcgttcgtaaagttatagcgtatttggattattcgttttggtggcgtttggtcgttaggaggtagtattttgtttgcggggcggagtcggggagttcgtttttttttttttagggttgaagggatttttttcggagttcgtttacgcgagatgaggacggtggtttagtttttttatgttttttttttgggggtcgttttcgttttcgtttcgtgcgttttttgggtggggtcgggggcggttttaaaattttttgtcgatttagtcggttttcgtcgtcgtcgtttttcgcgttttgggttattttttttttattttttttcgcggagtagttagatagcgagggtttcggtcgggggtaggggggacgtttcgttcggggtattttttcggttttgagtcgttcgcggggtcggtttcggttcggagcggaggaaggagtcgtcgaggagtagtttgaggttttagagtttgagacgagtcgtcgtcgttttcgttattgcggggaggagggggaggaggagcgggaggagggacgagttggtcgggagaagaggaaaaaaatttttgagattttttcgttgtcgttgggagtcggaggcgcggggattttttggcgcgacgttgtttcgcgaggaggtaggatttggggattttagatcgtttttttttgtcgtcggggacgtttgttttttttttgttttttatacggcgttttttaggcgtttttatttcggattagttttcgggagtcgtcgattcggtttttcgtaaagatttttttttagatttcgggcgtattttttgtacgtcgtttttattttcggtttgttttttgagttttcgcgtattttagatttttttttttttaggagacggattttttttcgatttgttatagattttttatttaagattatttattttttggtattagatcgcgtttatttaggttattttcgtgggatattgagatattttcggtttaagttttttttttattattgcgtttttttttttgaggagttttagttttttttcgaggtttttttattttttgtcgggagatttttagtttttgtaggggcggggtttttttattatattagttttgttcgcgttttcggtagtgtcggggggcgtcgttttttttatg

SEQ ID NO: 78 - DNA, 2205 bp, Artificial Sequence
  chemically treated genomic DNA (Homo sapiens)
tatgggggaggcggcgtttttcggtattgtcgagagcgcgaatagggttggtgtggtggggaggtttcgtttttgtaggggttgggggtttttcggtaaaaggtaggagggtttcgagggaaagttgaggttttttagggagaagggcgtagtggtggaggggaggtttggatcgggggtgttttagtattttacggaaataatttagatgggcgcgatttggtattagaaggtgggtggttttgaataggggatttgtggtaggtcggagagagattcgttttttggaggagaaagggtttaggatgcgcgggggtttaggagataggtcggggatgaaggcggcgtgtagggggtgcgttcgaggtttggggaaaagtttttgcgggaggtcgggtcggcgattttcgagggttggttcggaatgggggcgtttgagggacgtcgtgtagggggtagggagggagtaagcgttttcggcggtaaagggaggcggtttggggtttttaagttttgttttttcgcggggtagcgtcgcgttaagaggttttcgcgttttcggtttttagcggtaacggaaaagttttaaaagtttttttttttttttttcgattagttcgttttttttttcgttttttttttttttttttttcgtagtggcgggggcggcggcggttcgttttagattttggggttttaggttgtttttcggcgattttttttttcgtttcgggtcgaggtcggtttcgcgggcggtttagagtcgggggggtgtttcggacggggcgttttttttgttttcggtcggggttttcgttgtttggttgtttcgcggagggaggtgggagggagatggtttagggcgcgaagggcggcggcggcggggatcggttgggtcggtagggggttttgaagtcgttttcggttttatttaggaagcgtacggggcgggagcgggggcggtttttagggggagggtatgggggggttgggttatcgtttttatttcgcgtgggcgggtttcgaggggggtttttttagttttgggggaaagggggcgggtttttcggtttcgtttcgtaaatagggtgttgttttttggcggttaagcgttattaaagcgggtgatttagatgcgttgtggttttgcgggcggtgtgggttattagagaaagaggattaggcggagaaggtttaattcgggggatgagatataggggagtcgattagaggagggggatttagaacggaaggagagttaggttgggaaataaggtaggagaaggagggtttgttaatatgggggttttcggagggtgttagtgggaggagggggtaataggatatttgagggatggaagggttaggaggtagatatttgtaagaattgtttttttttattgagtattttttatgtggttaagtagttttttgttatttaatattttgcgattttatatatttattgtttttaatttatagatagggaaattgggtttagagggatttcgaggttttagaaaggatagaagcggtgttatgttttagttggggttagttttgatagtttttagagtttgtgtttttgattattgtgttatttttttttattattgggtgttcggggtgtggatggtggtgacgttggaggtagagttttttagtattttacgtcgtagcggtcgaagttgcggagtagtaggtcgatttttaggtgtacggtgttattagtagttgtgtgtaggcgatagcggtcggttttattgtagatggtgtttttatgtagtagttgcggtttattatttacgaaagttcgtgttaattgttttcgttaattgtttaggggtcgttacgtggggtaggttagttggtgggtgttcgggttattgggtatatggtaaaatttatagtttgtaagttggtagcggttaaagttgttttgggattatatttggaaatggagtcggggttagtttgtaggaaaggagagagaggggaaaggagggatgggtggggattagatttttgttgattttttattttttgatatttattggagattttaggtttagtttttttttttttgggtttttgttttagagtttttaatttagttttttttttaggtttttatcgttttatttatttttatatagtagttaaagtgatttttttaaatttatgttatttttttgttaaggattt

SEQ ID NO: 79 - DNA, 3037 bp, Artificial Sequence
  chemically treated genomic DNA (Homo sapiens)
gaattttcgaaattttttttgtagaaaattttggaaggtgtttgttatattgattttggaatgtgtgtttatttggggttatataaatttgttttgtggaagttatttgaagttaggaagagatggagggtattttttaggagtgagatgagattttattatatttgattgtttagtattatttttgagtgaggggattaaaaaatttattttttaaattaggatatttttaagagtggaagggggatttattaatatttttatttggataagaggtaaatattagaatgttttcgatgaaggggatatataatggatttttttgatgtgaaatttgttagatgggttggaaagttcgtatattgggataagtatgatttgagttgtttgggataaggataggggtataagagaaggaaatgggtaaagagagaagtttgtatttagttaagggtgtagagatgttatatatgattgttttttagggaatcgggtttttagtttatattttagttgtttaattattttttttttgaattgattgttttttttttggaattttaggtttgattttattttttggtttttttagtttacgatttttttgattcgatttttttttttagaatttagtcgtttgaatttttagtttgtggtttttttttaggttttagttttttttgtttttgattgaaatagtagtattttttaagttttgggggttttttcgggttttagtttcgatttagaattcgttcgttgtttgttacgttgttattgtcgttttttttataaagggatttgagcgttcgggtttaggggtttcgtatagtaggtgaggtttttttgttttatttttttgggttgttcgtgtttcgtgttttggattatcgtttagtagtgttttgttttttgtttgggtttcggttttttttgtatttgttgtttggattttcggtttgtttgggtttgggttttggtgggtttggttttggtttttttttttgtttttgattttttatttgttagttttattgtttttgttatatattttttgtttttgttatggtttttttttgttttttttttgtttttttttgtttttttttgtttattttggggtttttttgattgtattttgtttttttttttgtcgatttttttttcgggggtcggggggtgttgttttttagggcgggaggtttgtttttcgtcgcgtgtttcgtttcgtttattgtttttttttttttttttttttttttgtaggttttttttatgatattatttgaacgttttttttttttaagggtgtgtggtattattttatattttttttttttggggttgttgttggttttgttgtttggggtttaggtgaggtagtaggagaatgggggttgttggggtggtttagttaaattttgagttttagagttttttttaattttgtttttttttaggggttttttggtgttggttttatatttttagttgtttagattgttcgttagtattttaagatgtattttgtttatagtaattttaaatttgttgtttattttattggtaaatatttatttgattttttagatatgtttttattagttttttttttatttttgttttaggaatttaagtatttattttttttttttaattttttttacgttaaaaaaaatagagggagtttatttttatgtttttttttgttattttttaggaatttagttgtttagtgtttatttttttagggattgagatttttgatttagatttttgattttttatttttattttttatggttttttttaggagattttagtaagtagaatttattgttttggagagtaaatacggatcgtgtttttttttaggatggtttttttttgagtaataatttttttttggtttttattagtggtatttatttcgtttatttttaggtggttttttttgggaaagtttatttttttaaggttattttttttttattttatttggtttatgaggtttagtttttttttttttagtattttttttatgtgtttttttttagtttttagaagatggtgtatttagggttgtaggaattttggttgtattcgatgtattacggggttgcgttttagtttatttagggagattagttatttatttatatagatggtattttttatttagtttttagttttagtattgttttttttggagttttcgttttgtagaatttggaaaaatttagaaagaaaaaataattgattttaagattttttttttattttgtttttattttgattattttaggggtcgttattattttttttttggttattttaatagtttaagttttttttgattaagttatcggagtttttaaagaaggaattttaggtattttaggggattatatttttttgaattatttttgatgtttgtttggttgaggattttaagtttgtttaggaatttttagtttaaagttgttggttttgtttattagttaggtggggtttagatttatatatagaggaagagtaggtatatggaggagtttgggggatgattagaggtagggaggggattatttatgaaggtaaaaaaattaaattatttatttatggaggatggagagaggggaataatagaagaatatttaaggagaaatagagataggtttaagagatgaagagtgagagggtatgcgtataaggttgattaagagagaaagaagtaggtatgagggattatagggttttagaaggtagggaaaggttttgaaagttagttgtcgattagagttttatacggaggtatttgtattttcgatgaagtttaataaattttttttttttgaaatgttgtttgtttgtgtgtgtgtgtttgggagtgagaattttttagtttatttaaggaatggagggagggatagagggtttaaagggagtaagagttgtggggagaataaaaggataagggtttagagagttttagggatatgtgatggatttattaggtgaggtcgttagattgttgtag

SEQ ID NO: 80 - DNA, 3037 bp, Artificial Sequence
  chemically treated genomic DNA (Homo sapiens)
ttgtagtagtttggcggttttatttggtgagtttattatatatttttgaagttttttgagtttttatttttttgttttttttatagtttttgttttttttgagttttttgtttttttttttattttttagatagattgggaagtttttatttttagatatatatatataagtagatagtattttagagaaaagaggtttattgggttttatcgagggtgtagatgttttcgtgtggggttttggtcggtagttggtttttagagtttttttttgttttttggggttttgtgattttttatgtttattttttttttttttggttagttttgtgcgtatgtttttttattttttattttttgggtttgtttttgtttttttttggatgtttttttattatttttttttttttattttttataaataaataatttaatttttttgtttttataaatagttttttttttgtttttagttattttttaagtttttttatgtgtttgttttttttttgtgtgtggatttaggttttatttagttggtggataagattaatagttttgggttgggaatttttaggtaggtttgaaatttttagttagatagatattagggatggtttagggaggtgtggttttttgggatgtttagaattttttttttgaaagtttcggtgatttgattagggaagatttgagttgttggaatggttaaaggagaggtggtgacgatttttgaaatggttagaatggaggtagaatggggagaaggttttgaaattaattattttttttttttggatttttttaagttttatagagcgaaggttttaaagaagatagtattagggttgaggattaggtgggggatgttatttgtgtgggtggatagttggtttttttgggtgagttggaacgtagtttcgtggtatatcgagtgtagttagggtttttgtagttttggatatattattttttgggagttgaggagaggtatatggaaggggtattgggaggagaagagttggattttatgggttaggtagagtggggaggaggtggttttgggagagtaggtttttttagagaagattatttgggagtagacgaagtagatgttattggtggggattaggagagaattgttgtttaaggagaaattattttggaggaaggtacggttcgtgtttgttttttagagtagtgagttttgtttgttggggttttttaggaagagttataggggatgggggtgggagattaggggtttggattagaggttttaatttttgaggaagtgggtattgaataattgagtttttgggggatggtagggggaggtataggagtgggttttttttgttttttttagcgtgggggaagttgggggagaggggtggatgtttgggtttttgaggtaggggtaggaggagagttggtggggatatgtttgggaggttaggtggatgtttattaatgaggtgagtagtaggtttgaggttgttgtgggtaagatgtattttggggtgttgacgggtagtttgggtagttgaaggtgtgaggttaatattagggagtttttaggggagaatagagttgaggggggttttagggtttaaggtttggttgagttattttagtagtttttatttttttgttgttttatttgggttttaggtagtagaattagtagtagttttagaaggaggaggtgtagggtggtgttatatatttttgggaggaagagacgtttaggtggtgttatggggagaatttgtagagaaagagagagagagagagagatagtgagcggggcggggtacgcggcggaagatagatttttcgttttgggagatagtatttttcgattttcgagagagagatcgatagagaaggggataagatgtagttagagaaattttaaggtgagtagagggagatagagagagataggaagggaatagagaggaattatggtagaaatagagaatgtgtgatagagataatgagattgatagatggagagttagagatagagaaggaaattaaaattaaatttattaaggtttaggtttaggtaggtcggggatttaggtagtaggtgtaggagggatcgaggtttaggtagagggtaggatattgttgggcggtagtttaaagtacgaagtacgggtagtttaaggagatggggtaggagagttttatttgttgtgcggagtttttgggttcggacgtttaggtttttttatagaggaagcggtagtggtagcgtggtaggtagcgggcgggttttaggtcggggttggggttcggggaagtttttagggtttagaagatattgttgttttagttaaaggtaggaaaggttgaggtttaggagagaattataggttgggggtttaggcgattgagttttgggaaagggagtcgggttaggggaatcgtgggttgggagggttagggagtggggttaggtttagagttttaaagaagggatagttaatttagagaggaggtggttgagtagttggggtgtgagttggaggttcggttttttgaagagtaattatatataatatttttgtatttttggttgagtataggtttttttttttgtttattttttttttttgtatttttgtttttgttttaaataatttaaattatatttgttttagtatacggattttttagtttatttggtaggttttatattaagaaggtttattatatattttttttatcggggatattttggtgtttgttttttgtttaggtgaaaatattaatggattttttttttatttttgaaagtgttttagtttggaagataaattttttggtttttttatttagagatgatgttggatagttaagtatgatgaggttttattttatttttgaaggatgttttttatttttttttgattttaggtggtttttatagaatagatttatataattttaaataaatatatattttaggattaatgtggtagatattttttaaagttttttataaaggaagtttcgagaattt

SEQ ID NO: 81 - DNA, 3107 bp, Artificial Sequence
  chemically treated genomic DNA (Homo sapiens)
ttgtagtgaacggtgattatattattgtatattagtttggggatatagttagattttgttataaaaaagtaaaaataattggttagtgtatgaggggttcgtgttttttgtttgtttgtttgttgagatagagttttattttgtcgttagattggaatgtagtggtatattttcggtttattgtaatttttgttttttaggtttaagtaattatttgttttagttttttaagtagttgggattataggcgttcgtattacgttcggttaatttttttgtatttttagtagagacggggttttattattttggttaggttggttttgaatttttgattttatgatttattcgtttcggttttttaaagtgttgggattataggcgtgagtttttcgttcggttaggggcgcgcgtttttaaaatatgggagagggaattgtgttttataattattattaggtgtttcgatatcgggtgttacgtcgtttcgtttttgaggcgcggcggtttattttggtaggtcgaggcgggtggattatttgaggttaggagttcgagattagtttgataaatatggtgaaatttcgtttttattaaaaatataaaaaattagtcggacgtggtggcgtatgtttgtaattttagttatttgggaggttgaggtaggagaatcgtttgaattcgggaggcggaggttgcgatgagtcgagatcgcgttattgtattttagtttgggaaataagagcgaaattcgttttaagaaaaaaaaggaaagattttttttttttttttcgtcggaaatatttttttttaggacggcgcgtttgtgcggcgacgcgcgtttagttatttagtaatttcggcgttaagttattttaggtggagtttagtaataatagagttatcgcgttttttattaattagcgtcgatttcgttttcgtaggtttaattaattagtgtcggcgttgtaaggaagtttttagagttttcgaggaaggtttttttaatttaaatttattcgtttgataatttttttatatttttttaaagaaggaagagaagcgtatagaggagaagggaaataattttttaggagttttttttacggttatgaggaatttggggtttagttgaaaagtttaaattgtttttcgggaggttgggcgcggcgaattatttttagcggcgtacggagacggcgtttacgtgaggggtgataagtgacgtaatattcgttgtataaatttgttttcgttagttcggagtatttaggggcggttggttttgttgggtgagtttgtttgtgtttttgtgggtggacgtggttggtgattggtaggattttggtattcgttaataggtattggttcgtagtcgtaacgattttgggggggtgtgagaggggggaatgggtgaggttaaggtggaggttttttggggttgggtgggtcgttgaggggagggcgtgggggaggggagggcgaggtgacgcggcgttgggttttttcgggatagtgggttttgttgatttgaggggggcgagggcggttggcgcgcgcgggttgacggaaattaacggacgtttaatcgatcggcgattttgtcgagtttatttcgcggggaaggcggaaaagaggtagtttgtgtggtttttggaagtttttattttggaattttagtgtgagaaaggtgtttttttttgtgttttaatgggatttttatttcgcgagttttgtgggtttggttttgtttttagtttgtttaatatcgtgtttaggtttgaggtagattggagttcggtcgggggagtttgaatattcggaatagttagtggggaaagttgtggacgtttggtaagagagcgttttggatttttcgttgttgacgttgaaattttgaatgacgaatttcgtattaagtgatttagttttgtaaaattgaggggaggtttgcggaatattaacgtatttaaggtattttgaaggaatagttgttaattttgaagaatattaggtgtaaaagtaagaaatataatgattttgaggtgatacgtttatgttttatttttaaattaggttaaaatgtagattttcgtgaaaatttttatcggtaagattattatttttgaggtggagtttagtgatattatcgaaaatgtgaaggttaagatttaggataaggaaggtatttttttcgattagtagaggtttatttttgtaggtaagtagttggaagatggtcgtattttttttgattataatatttagaaggagtcgattttgtatttggttttgcgtttgagaggtggtatgtagattttcgtgaagattttgatcggtaagattattattttggaagtggagtttagtgatattatcgaaaatgtgaaggttaagatttaggataaagaaggtatttttttcgattagtagaggtttatttttgtaggtaagtagttggaagatggtcgtattttttttgattataatatttagaaggagtcgattttgtatttggttttgcgtttgagaggtggtatgtagattttcgtgaagattttgatcggtaagattattattttggaagtggagtttagtgatattatcgaaaatgtgaaggttaagatttaagataaagaaggtatttttttcgattagtagaggtttatttttgtaggtaagtagttggaagatggtcgtattttttttgattataatatttagaaggagtcgattttgtatttggttttgcgtttgaggggtggttgttaattttttagttatggtattcgtagtgtttagtgatggtattattttgtattatagttatttgttttaatttaagtttagaaattataagttttagtaatagttgaatttgtttaaaatgttaataaaggtttcgttgtatggtagtatatttggtgttttgttatgaaattttttagtgatgtgtgggtacgtttaaaattggtgaaaatgtttagggatttaattttgagattggtaatgtgtttaaagttaagttatttgattttggtatatatttgggtgggttgaggggtaagagttttttttgttgtttaagttattataagttaggattt

SEQ ID NO: 82 - DNA, 3107 bp, Artificial Sequence
  chemically treated genomic DNA (Homo sapiens)
ggattttaatttgtaatgatttaaatagtaaagaaggtttttgttttttagtttatttaagtgtatattaaagttaagtgatttaattttgagtatattattaattttaaaattaaatttttaaatatttttattagttttaagcgtatttatatattattagagaattttatgataaaatattaagtatgttattatgtaacgaaatttttattaatattttgaataggtttagttattattgaaatttgtaatttttaaatttaagttggggtaaatggttatagtgtagagtaatgttattattgggtattgcgaatgttatgattgaagaattaatagttattttttaggcgtaggattaggtgtagggtcgattttttttggatgttgtagttagaaagagtgcggttattttttagttgtttgtttgtaaagatgagtttttgttggtcgggagggatgttttttttattttggattttggtttttatattttcgatggtgttattgggttttatttttagagtgatggttttgtcggttagggtttttacgaagatttgtatattattttttagacgtaggattaggtgtagggtcgattttttttggatgttgtagttagaaagagtgcggttattttttagttgtttgtttgtaaagatgagtttttgttggtcgggagggatgttttttttattttggattttggtttttatattttcgatggtgttattgggttttatttttagggtgatggttttgtcggttagggtttttacgaagatttgtatattattttttagacgtaggattaggtgtagggtcgattttttttggatgttgtagttagaaagagtacggttattttttagttgtttgtttgtaaagatgagtttttgttggtcggggggaatgttttttttattttggattttggtttttatattttcgatggtgttattgggttttattttaagggtgatggttttgtcggtaagggtttttacgaagatttgtattttgatttagtttaaaagtaaaatataagcgtgttattttaggattattgtattttttgtttttatatttaatattttttaaaattagtaattatttttttaaaatgttttaaatacgttaatatttcgtaagtttttttttaattttataaggttaagttatttaatacgaaattcgttatttaaggttttaacgttaatagcggaaaatttagagcgtttttttattaagcgtttatagttttttttattaattgtttcggatatttaaattttttcgatcgaattttaatttgttttaaatttaagtacggtgttaggtaaattgaaaataaaattaaatttataagattcgcgaaataaaaattttattgaaatataagaaggggtattttttttatattgggattttaaagtaaaggtttttagaaattatataaattatttttttttcgtttttttcgcgaagtaaattcgatagaatcgtcgatcggttaggcgttcgttagttttcgttaattcgcgcgcgttaatcgttttcgttttttttaggttaataaggtttattgtttcggaaaggtttagcgtcgcgttatttcgttttttttttttttacgttttttttttagcggtttatttaattttaagaagtttttattttgattttatttattttttttttttatatttttttaaggtcgttacggttgcgggttagtatttgttagcggatattaggattttgttaattattaattacgtttatttatagggatataaataagtttatttaataaagttaatcgtttttaaatgtttcgggttggcggaggtaaatttatgtaacgagtgttgcgttatttattattttttacgtagacgtcgttttcgtgcgtcgttgaaagtagttcgtcgcgtttaatttttcgagaggtagtttaggttttttaattgagttttaaattttttatagtcgtaagaaaggtttttaaaaaattatttttttttttttttatgcgttttttttttttttttaggaaaatataagaaaattattaggcggatgaatttgagttgaagaaatttttttcgaaagttttggaaatttttttgtagcgtcggtattgattggttaggtttgcgaaggcgaggtcggcgttgattggtgggggacgcggtggttttgttgttgttgggttttatttggggtggtttagcgtcgaggttgttaagtaattgagcgcgcgtcgtcgtataggcgcgtcgttttgaaagagggtattttcggcgggagaaggagggggggttttttttttttttttttgagacggatttcgtttttgttttttaggttggagtgtaatggcgcgatttcggtttatcgtaattttcgtttttcgggtttaagcgatttttttgttttagttttttaagtagttgggattataggtatgcgttattacgttcggttaattttttgtatttttagtagagacggggttttattatgtttgttaggttggtttcgaatttttgattttaggtaatttattcgtttcggtttgttaaagtgggtcgtcgcgttttagaagcgggacggcgtggtattcgatatcgagatatttgatggtgattgtgaagtataatttttttttttatgttttaaaaacgcgcgtttttggtcgggcgggaggtttacgtttgtaattttagtattttgggaggtcgaggcgggtggattatgaggttaggggtttaagattagtttggttaaggtggtgaaatttcgtttttattaaaaatataaaaaaattagtcgggcgtggtgcgggcgtttgtaattttagttatttgggaggttgaggtagataattgtttgaatttaggaggtagagattgtagtgggtcgagaatgtgttattgtattttagtttggcgatagagtgagattttgttttaataaatagataaataaaaaatacgagttttttatatattggttagttgtttttgtttttttgtgataaagtttggttgtgtttttaggttggtgtgtagtggtgtgattatcgtttattgtag

SEQ ID NO: 83 - DNA, 5969 bp, Artificial Sequence
  chemically treated genomic DNA (Homo sapiens)
ttaaggaggaaggatttataattgatttcgttgttttttattagtgttaaaatagattagtttagtgatgtttaagtggatacgatttagaagcgagacgtaaagaggttaaatacgggtaaatcgtacgtaaaattttgatattattgtaatacgttcgtggggtgggggtggtaagagtgttttagtatcgtagtttcggcgtagatcggaatttcgtagttattttggtggtttcgtggtgggaaagacgcgttttagcgaatcggtcgcgttattttcggagtacgttgggaattacggtaggttagggcgtaaagagagtagtcgggcggttttttggtgttatttgttggtttttcgtgtgtggtaagtattgtcgttttttcgttgattatttgttgggttattgtcgagaattacggttggggtgagaattgtggtttggcgttattttttagtgagggttattttggtgttcggaaagggcgttgggttattagtatattgttacgagtgggagtaggagttttgtagtcggatatcgtggattttgtttttgtttttttcgttttggttgtgtggttttttataggttatttaatttttttggggttaagttgttttatttgtgaagtggggattatagtatttatgttatgagagcgtttgaggagatgataggatgtatgagaaatgttttgttttttaaataaatgttggttttattattgttcgtttttttttgtttttttgttttttgatgttgtttttgtttgttttgtttttttgagataggattttattttgttgtttaagttggaatgtaatggtatgattatagtttattgtagttttgaatttttgggttagagcgattttttcgttttagtttttggagtagttgggattataggtatattttattttattttaaataatttttttattatttttagtagagatagggttttgttatgttgtttaggttggttttaagtttttgggtttaagtgatttttttatttgggttttttaaattgttgggattataggcgtgagttattacgatcggtttttaatttttatttattttgtttttttttaatggaacgaaagttttatgagattagaggttttgttttgatagattttaataaatgtataatattgtatgattattattataattaagatttaagatagtttcgtttttttataaaattgttttagttttttaattaatttcgtttattatttagtattagtaattattgatttgttttttttttttatagttttgttttttttagaattttatatatagggaattgtcgtggtttgaatatttgtttttttaaaattcgcgttgaaatttaatttttagtgtggtagtattgagaggtggggttttgaagaggcgattgggatatgagagttttgttataatgtttttataaatgaattaatagattaatgggtttaggggttaatgggttaatgggttatcgtgggagtgggattggtgtttttataaaaggaagaagagagatttgagttagtatattgaggtttttcgcgatgtgatgttttatacggttttaggatttaatagagtttttattagtaagagggtttttattagatgtagttttttaatttcggattttttagtttttatgagaaatgtttttgtgggattttttttatttaagtatattgtttttaagatttatttatgcgtttttttattttttcgtttttttttgtgagataaggtttggttttattgtttaagttggagtgtagttgtatgatttcggtttattgtaatttttattttttaggttttatttttattttagttttttaagtagttgggattataggtatgtattattatattcggttaatttttgtattttttgtagagatgggtttttgttatgttgtttaggttggtttttatagtttttagttggtgagttgaagaaattcgtttgttttggttttttaaagtgttggaattgtagttatgagtcgttgtgtttagtcgtatatgtatatttgtattatttatttgtttttttttattattggtatagaagggatgttttataggagtaggttttatatagggttgtttttttgattttaggttattatgagtaaaattattataaatatttatatataagttttgtgaatatagttttttattttttttgggtaaataatgtttaggtgtgggagtgttgggttatagtggttttaagggtaaatgatttttagttttgagttttttttttttagattttagttttttgttttaggtattgggatatattagtaataagaagtagtaagtttttttttttatttaggttatatttcggggatggagatagaaatatataaggaaagaataaataatatgttgtttttaaagaaattgtgtaaaaagaaaaaataaataagatgtttttgtatagtatagtagttatagagtaatgggttagaaagtggggtaggaggagaagttttttttagggaaagattttgagttgagatttgaggttttttaggtaaggggacggtgaatgtaagggtgtgtaggttatagggggataagttgggtgtgtttagtaattgtgttgggagttggatttagtagtgggggtttttattagagaggaggtagtattgagatttgggtaggaagttggggtttattttaagtttttttgaaaattaaagaagggttttaatttaaggattgtttttttttttttttttttttttttgtttgtagatagggttttgttttgttatttaggttggagtgtagtggtataattttagtttattgtaattttcgtttttcgggtttaagtgatttttttgttttagttttttgagtagttgggattgtaaatgtatgttattacgtttggttaatttttgtatttttagtagagacggggttttattatgtttgttaggttggtttcgaatttttgtgtttaagcgatacgtttttttttggttttttaaagtgttgggattataggcgtgagttatcgagttgggttaggttttaggtattgttatgatgtaaaaatttttttttagaaaagagaatattagttttttagttggttttttgtagttaggagatgtaagagtagtagttgaatttgaggtttgttttggagaaagaattaaaagtagatatggatggtttggatgtgagggagggaaagagaattttaagtgtattagtagtggtgggaggaggttcggtatagtggtgttatttggaagataaatcgttggtgtttaatttttatgattcgaaagttttttataagtttgatatattaggtaaaatgtttgattgtattaagttttagtttatcgttataaaataggttatgaaaattgcgtgagaaaatgtatataatagtttaataaataatattggttgggtgtggtggtttatgtttgtaattttagtattttgggaggttaaggtgggtagatcgtttgaggttaggagttcgagattagattggttaatatggtgagattttttatttttattaaaaaaatataaaatatatttgggtaaatatggtgaaattttatttttattaaaaatagaaaaattagttaggcgtggtggcgcgcgtttataattttagttgaggtacgagaatcgtttgaattcgggaggcggaggttgtagtgggttgagattatattattgtattttagtttgggcgatagagtaagattttgttttaaaaataaaatatatatataaaatataatagtatttgtttgtttgtttgtttttgagatgtttcggattatagtgcggggattatagacgtgagttattaagttcggataatattattatattgtttattgtatttttataatatttttaaggggtaggaatttttttttttagtttttttttttcgattttatcgagagatagggtttcgttttgtcgtttaggtttggagtgtattggcgcgattaaagtttattatagtttagattttttggttttaagcgattttttagtttgggttttttaaagcgttaggattataggcgtgggttatcgcgtttgattagttttttttttttgtagttgagttttaagagtttgtttaaagagtagaggtgggttgaaggtataaagcgaatgaaagaataggttttcgggtatcgttgtacgttttatttttttttaggggcgttgtattttagtttttttcgtatatgcgtattgggttttttatcgtttttcgtttttagtaaagtttttcgttcggagtatgcgcgggtcgtttggcgttaattgttgatcgttatagttatagttagggttagtttcgtcggttttcgggtggcgcgcgttcgttgtttttttagttttaggatgatcggttagaagacgttttattttttttttttttttagtttcgttaggaagcgatacgtttttagtttcgagtcggtcgtttaggggatcggcgtggttggggtgtttgaggaaagcggagatgcggcggtgaggcgcggtttgggtcggggttagggggtgaagggggaggaaggcggtgggtttcgtttgacggagggcgtgtaggatcgcgtttttgattcggtaaattcgggtttcgttttttaaatagtttttacgtgtttaaaatagtcgtcgttgttttttatgggtcgttatgttaaagggttagttaatgggaacgcgtttcggggtttatggcgttaattcgcgcgtcgtaggtttttttggttcggtgcgttgtttaattagaggggagagggggcgggatttagagggaggttttttgtcgcgaaaagattacgtggggacgcggtggggcgggtttggcgggggcggggtatttttgtgtagggtttttagttatcgcgacgtttttcgggaagttatagggcgttttttagttcgttttttcgttttagtttagaatttaatttttaattttcggatcgggtttagttttgggtttttattgttcgtttttgttgggatttgttttataaatgggcgttttttgttttgggtcgtgggggttgggtcggaagttgcggacgtttgggaaggggtcgttgtagtttttgagtcgtttttgcggggattatttgtaggttattttagttaagaaggtttcggttgggtaggaggagtttgggacgtcgtttttttcgtcgttgagtgtcgagtagttggatcggatttagaggaataaggtcgcggttttgtttagattcgcggttcgtaacgtgttcgtgggttttggagagagttggaagaagtattttagcggggagttcgggaaatcgtattttattaaggtaaatatggaaatgtattttttataagggtaaatgtggaggttgtcggtttttttgttttgttagtgtagtcggttaagtttatgttttcgtaggtttaggttgtattttttttaattttttttatttataaagggggtaaaagaaagttatgatgttttattttgtagttttatattggttaaagttgttaacgattcgcgagatgatattatggatttatttaagttatatagtttattgtttaggaaaggttggcgtagtaaaattattaattattttgaatgaaatttggtttgagttttaaaaagtcgagaggagtggtattgttaggatttagtttagagaaagaggtaaggaattgatttgattgaattatttaggtgggggggtaggtattgtttttgtttgttgttttttaaaagaatttggatataatatgataaagaattaatgatgttttaaataatttgtattagaagtttttttattgaatttttatggtttttaatgagaatttgattttaagtttagtttatttttaaattagt

SEQ ID NO: 84 - DNA, 5969 bp, Artificial Sequence
  chemically treated genomic DNA (Homo sapiens)
gttgatttaaagataaattagatttaaaattagatttttattggaaattataagaatttaataagaaagtttttagtgtaagttatttggaatattattagttttttgttatgttatgtttaaatttttttaaaaaataataaataaaaatagtgtttgtttttttatttaagtggtttaattaggttaattttttgtttttttttttgggttgggttttgatagtgttatttttttcggttttttaaagtttaagttaggttttatttaggatggttggtgattttattacgttagttttttttggataatagattatgtgatttaaatgaatttatgatattatttcgcgggtcgttaataattttaattaatataaagttgtagagtgaaatattatggtttttttttattttttttgtgagtaaaggaggttgaagggggtataatttaagtttacggaaatatgaatttggtcggttatattaataagataaaagggtcggtagtttttatatttatttttatggaaggtgtatttttatatttattttgataaaatacggtttttcgaatttttcgttgaggtgttttttttagttttttttaaagtttacgggtacgttgcgggtcgcgagtttgagtagggtcgcggttttgtttttttggattcggtttaattgttcggtatttagcggcgaggagggcggcgttttaggttttttttgtttagtcggggtttttttggttgggatggtttgtaagtggttttcgtagaggcggtttaagagttgtagcggtttttttttaggcgttcgtagttttcggtttaatttttacggtttaaggtagaagacgtttatttgtggaataggttttagtaaaagcggatagtaagagtttagggttgggttcggttcgggaattgggaattaggttttaaattggagcggggagacgggttgggaggcgttttatggtttttcgaggagcgtcgcggtgattgggaattttgtatagaggtgtttcgttttcgttagattcgttttatcgcgtttttacgtggttttttcgcggtaaaaaatttttttttgggtttcgtttttttttttttttgattggatagcgtatcgagttaggagggtttgcggcgcgcggattggcgttatgggtttcgagacgcgtttttattggttggttttttagtatggcggtttatgggggatagcggcggttattttgaatacgtggaggttatttggaaagcggagttcgggtttatcgagttagaggcgcgattttgtacgtttttcgttaggcggggtttatcgtttttttttttttttattttttagtttcggtttaagtcgcgttttatcgtcgtattttcgttttttttaggtattttagttacgtcggttttttggacggtcggttcggggttgggggcgtgtcgttttttggcggggttgggggagaaaaaggagtagagcgttttttggtcgattattttggagttgaggaggtagcgaacgcgcgttattcgggaatcggcgaggttagttttggttgtggttgtggcggttagtaattggcgttaagcggttcgcgtatgtttcgagcggggggttttgttgggggcggggggcggtggaaggtttagtgcgtatgtgcgggaggggttggagtgtaacgtttttgggaggaggtggggcgtgtaacggtgttcgggggtttatttttttattcgttttgtgtttttagtttatttttgttttttggataggtttttaaggtttagttgtaagaagagaagattggttaggcgcggtggtttacgtttgtaattttagcgttttgggaggtttaggttggaggatcgtttgaggttagagggtttgagttgtagtgagttttgatcgcgttaatgtattttaggtttgggcgatagagcgagattttgtttttcggtggggtcggggggagggggttgggaagaaaagtttttgttttttaggggtgttgtgggagtgtaatgaataatataataatattgttcgggtttgatggtttacgtttgtaattttcgtattgtaattcgaggtattttaaaaataaataaataaataaatattattatattttgtgtgtgtattttgtttttgagatagagttttgttttgtcgtttaggttggaatgtagtggtgtgattttagtttattgtaattttcgtttttcggatttaagcgattttcgtgttttagttaggattataggcgcgcgttattacgtttggttaatttttttatttttagtagaaatggggttttattatgtttgtttaagtgtgttttgtatttttttagtagagatgggggattttattatgttggttagtttggtttcgaatttttgattttaggcgatttgtttattttggttttttaaagtgttgggattataggtatgagttattatatttagttaatattatttgttgaattgttatatatatttttttacgtaatttttatggtttattttatgacgataaattaaggtttagtgtagttaaatattttgtttaatgtattaggtttgtgggagattttcgggttatagaggttaaatattaacgatttgttttttaaatgatattattgtatcgaatttttttttattattattaatatatttaggatttttttttttttttttatatttaaattatttatatttgtttttggttttttttttaaagtaaattttaaatttaattgttgtttttgtattttttagttatagaagattagttgggaagttggtgtttttttttttagagagagatttttatattatgataatatttggggtttggtttagttcggtggtttacgtttgtaattttaatattttgggaggttaaggaggggcgtatcgtttgagtataggagttcgagattagtttggtaaatatggtgaaatttcgtttttattaaaaatataaaaattagttaggcgtggtggtatgtatttgtaattttagttatttaggaggttgaggtaggagaattatttgaattcgggaggcggaggttgtagtgagttgagattgtgttattgtattttagtttgggtgatagagtaagattttgtttataaataaaaaaaagaaaaagaaaaaaaagataatttttaggttaaaatttttttttggtttttaaaaaggtttagaataaattttagttttttatttaggttttagtgttgttttttttttgatggaagtttttattattgagtttagtttttagtataattgttggatatatttagtttgtttttttgtggtttgtatatttttgtatttatcgtttttttgtttggaaagttttaggttttagtttaggatttttttttgaaaaggatttttttttttgttttattttttagtttattgttttataattgttatattatataaaagtattttatttattttttttttttatataatttttttagagatagtatattatttattttttttttgtgtgtttttgtttttattttcgaaatgtaatttgagtgaagaaaggaatttgttgttttttgttgttggtgtgttttagtgtttaggataagaagttgaagtttaagggagagaggtttaaagttgaaaattatttgtttttagagttattatgatttagtatttttatatttaggtattatttatttaagggaaatgaaaaattatatttataaagtttgtatgtgaatgtttatagtgattttatttatagtaatttaaaattagagaaataattttatgtggggtttatttttgtggggtattttttttatattagtaataaaaaggaataaataagtaatataaatgtgtatatacgattgggtatagcggtttatgattgtaattttagtattttgggaggttaaggtaggcggatttttttagtttattagttgaagattatggagattagtttgggtaatatggtaaaaatttatttttataaaaaatataaaaattagtcgggtgtagtggtgtatgtttgtagttttagttatttgggaggttgaggtgggagtggagtttgggaagtggaggttgtagtgagtcgagattatgtaattgtattttagtttaggtagtagagttagattttgttttataaaaaaaagcggggaggtgggggggcgtataaatgaattttaaaagtaatatgtttaagtgaaagaagttttataaaggtattttttatagaggttgagaggttcgaggttgaggggttgtatttggtgaaaatttttttgttggtggggattttgttgagttttgaagtcgtgtagggtattatatcgcgaggggttttagtgtgttagtttaggtttttttttttttttttataaagatattagttttatttttacggtaatttattaatttattaatttttgagtttattaatttattaatttatttatgaggatattatgatagagtttttatgttttaatcgtttttttaaggttttattttttaatattgttatattgaggattaaattttaacgcggattttggaggaatagatatttaaattacggtaattttttgtatatgaaattttggaaaaggtaaaattatagggagagaagatagattagtggttgttgatgttgggtgatgggcgaagttgattaagaggttggagtagttttatggagggacggaattgttttagattttgattgtggtggtgattatataatattgtatatttgttgaaatttgttaaaataaagtttttgattttatggagttttcgttttattgaggggagatagagtaaataaaaattaggagtcggtcgtggtggtttacgtttgtaattttaataatttgggaggtttaggtgggaggattatttgagtttaggagtttgagattagtttgggtaatatagtaaggttttatttttattaaaaataataaaaaaattatttagggtggggtgggatgtgtttgtagttttagttattttagaggttgagacgggaggatcgttttaatttaggagtttaaggttgtagtgagttatgattatgttattgtattttagtttgggtaatagagtgagattttgttttaaaaaaataaaataaataagaataatattaaaaaataagaaaataaagaaaaacgagtaataatggaattaatatttatttagaggatagagtattttttatgtattttgttatttttttaggcgtttttatgatataggtgttgtagtttttattttatagatgaggtaatttaattttagagaggttaagtgatttgtgggaggttatatagttagggcggaggagatagaaatagaatttacgatattcgattgtagaatttttgtttttattcgtgataatatattggtggtttaacgtttttttcggatattaaagtaatttttattgagaagtgacgttaagttatagtttttattttagtcgtgattttcgatagtggtttaataggtgattaacgggaaagcggtagtgtttgttatatacgggaggttagtaggtggtattagagggtcgttcggttgttttttttgcgttttagtttgtcgtagtttttagcgtgtttcggaagtgacgcgatcgattcgttggggcgcgttttttttattacgaggttattagggtgattgcgggatttcgatttgcgtcggagttgcgatgttagagtatttttgttatttttattttacggacgtgttgtagtgatattagaattttgcgtgcggtttattcgtgtttaatttttttgcgtttcgtttttgaatcgtatttatttgagtattattagattgatttattttaatattggtggggggtagcgaggttagttatgggttttttttttttaa

SEQ ID NO: 85 - DNA, 8111 bp, Artificial Sequence
  chemically treated genomic DNA (Homo sapiens)
aaatgggtatgttttggggttagatttggaggaatagtagagattggagtgttagaaggtgagtatgtttgggggtgttggggagatgtaatttattagggatagtttagtgttaggggattagattggggtttatgaaggagaggtagaggttgatgggtttaggggtggtgtgggtaggtgagtttttttagatagtgattttgttttgttttttttttagttaggtttttttttttatttttttttttttttttgattggatttttttgggagagttattttttttggttttttttgttttaatttttttattagttggttattattatttattattattttaagttaaatttttagatttatatggggttaggatattggtattggattaaagaggtttttttttttgttttttttttgtttttttaatgttttgttgtaaagatttaggcggggagagagagagagagagagagatagagattgatttatagttagggttagggaattgaggggaattaatttaatttttttttttttaatttattaggtttgtattttgttttttttgtagattagtgttttgttagttatttgggggttaggggatggagtgaaggataagatttttttttattgtagtgaagttatttggagaaatgtgtggaaaatagtaagatttagtgattttttttttattttttttttaattttaggagagattttgtttttttatttatcggtttttagattaattatttatatttatataggcgagagtttttttgaatattggaggtgataggatattaggataaagtataattattgtgttttggtttaattattattttttttgtttggggtcgtcgttggtttttggttgtttttcgtatttttttttatttttattttttttttttttttttttttatttggaatatttttttttttttttttggttttttttgaattgtttttagagttatagattgtggggagtggttattgcgtttttaaggtgaggttttttaagcggggtcgagtttgttttttaattgggagttagtatgatttttgtgtgggttgttttttgttttattgtttttttttttaatttgttaggtgattttgggtttttttgtgttttttttgggttttcggaggattttttggggagatagtttgttttgacgtttttttttttgtagtaagtagtttggggagggaggtgaggataagtgaagttaagttgtttagggggttaagtttatggaagggaagatgttatagagatatatgtggttttgtgattgttgttttgtgttttttttttttttttgaaagtttaggtgattaggtgatttgagtttttaatttggtgataatgtgggtattggttgagtttttaagagtatattgttgtaaatgtcggtgataatatattggggtatgggatttagagttaatttttttaggttatagttaggttatatttttataatgaaggggggaggtgggttatattttttcgttttaatgaaggtagtttaaaaatttttaggttaggttgtaattttagttttatataaaaggaattttgtgtttttatttttttggatttttgggtaaagttttagagggaaatataaataggttgttgtaatatattttgttgggtattattatggaggatagttggtttatgggggtggggggtgtttggggttacggagtgattggtgatggttatttttttttggaatttttttagtttttttttagttttagatttgtttatttgttttttattaagatttgtttttttaggtttgttggtttttttaggggttgaagaaggtcgagttgagaagggatgtaagggagggggttagaatgagtttttagggtttagagtttttattttgttttaagatgtttatagtttgtgtttttggggtgttagaggcgtataaggaggaaagttagtggttttttttttatatttcgtttattagtttagagtatggagtttaggtgaggaggtttgtttgggagggggttttgagttaggaaataaatatttattaattgtataaagattttgtttttgttgttggggagtttgttaagtggtggagataggattagtgtacgaatgatggaaagggagggttggggtgggtgggagttagtttttttttttataagggttttaggatattatatcgatggaattgggggtattggggaggtaatttagtatttttattaaattatagtaatatgtgttgaggatggggttgattaggtaagttttttggagcgttttggttaaattgagggaaattgttgtatttttatttttagtttatgtttttatagaggttatgttagttgtaggttagattttggtaagatttgggtggataattagattgattggttttattttttttataggttttagagttttaattttgttttttggggtagtttggaaatagttaggttagaaattagttaggaatttttttaagttgttttttatatgtaagaatgggatgggggtttttgggagtatttagggaagatgtggagagttggaggaaaagggggtttggaggtaagggaggggattgggggaaggataggggagaagttgtgagtttggagaagtagttaagggattttgagggaatgggggagttgagacgaaatttttatttttatttagaagatgagttatgagtttgggtttgggttgatagaagttttggtttttggtttggtgggagttttgggtagttggtttatagacgttttttagtgttggcgggtaggtttgaattattacgtaggttttggtttttattcgtttttattagttttttggttttagttttttggtaatatttggggttgggggggtagtaggaataagggtttttgtttgtttagttgtttttttttttgggttttgttagattttatagtgtatacgtgggttttaataggttttttttttttttagttattgattaatttcggaattatatagtttttcgtttttagttttataaatttggtgttaaattttttttttttgggaagtatttttggatattttttaaaggattttagttattttagtttgttggttgtcgtttattttgatgtttgtaggttagatgagggttttagatggtatattgttagagggatatattgtggtttttgtgtttagttttgggttttttgtatatgaagtaattttagttttaaatatgtagttgtttgggaggttagaaatagggggtttaggagtaaattttttttattttttttttaaagtttattttttttttagttagagtcggggtgtgtagacggtagttattagggggcgttcggttattatagggaagttgggtgaatggagcgagtagcgttttcgagagtgaggacgtgtgtgtttgtgtgggtgagtgagtgtgtgcgtgtggggttgagggcgttggagcggggagaaggttaggggttattttaggattttaatagatttgtgtgtttttttttttattcgtttttgttcggtttttcgtttttttttgttttttttaatatttttagtaaagagggaacggtttttaggttttgttcgtacgtaattttatttttttgtttttttttcgttaatgtttcgcgggcgcgtgtttttggatagagttttcgggggcggatgggtaatttttaggttgtgaattttggtgggggtcgagttttttttttattgcggcgggttgcgggttaggttttattgagcgttcgtagagttcgggttcgagtcgcgtgtggaagggttgaggttcgtttgttttcgtttttcggggcgggtcgggggcggggtttcggcggggcggagttatgcgttttttttttttttttttaaaagtcggttggtagcggggaggatcgcggaggtttggggtagtcgggtagttcggaggtcgtggcgttgggggttagtattagcgttttgtcgggaggcgtagcggttaggtggatcggttagcggatttatcggttagggcgttcggtgttggaatttgatatttattgattcgggttttattttttttttttttttttaaatatttttttttaaaattgtattgtttttcgttttaatttatttttgtttgttattttttatttgaatcgggtcgacggtttggggagattgttttatttttttaaattattgtggattttggaaattagtagaaagaggaaagaggtagtaagagttttagagagaagtcgaggaagagagagacggggttagagagagcgcgcgggcgtgcgagtagcgaaagcgataggggtaaagtgagtgatttgtttttgggggtgatcgtcggagcgcggcgtgagtttttttttttgggatttcgtagttgattagtcgcgttgacggatagatagatagatatcgtttttagttttagttattatttttttttcggtcggcggcggatagtggacgcggcggcgagtcgcgggtaggggtcggagttcgcgttcggaggcggggtggagggggtcggggttcgcggcgtcgtattgaaatttttcgtttaatttttgggttgttttcgtttcggaggagtcgtggttcgcgcgggggaagtcgagtcgagcggagtcgcgagaagtgttagttcgggtcgggaggagtcgtagtcggaggagggggaggaggaagaagagaaggaagaggagagggggtcgtagtggcgattcggcgttcggaagtcgggtttatggacgggtgaggcggcggtgtgcgtagatagtgttttagtcgcgcgcgttttttaggttttggttcgggtttcgggtcggggaggaagagtagttcgtcgaggcgtcgaggagagcgggtcgttttatagttcgagtcggagagggagcgcgagtcgcgtcggtttcggtcgggttttcgaaattatgaattttttgttgttttgggtgtattggagttttgttttgttgttttatttttattatgttaaggtaagcggtcgtgttttgttggcgtcgcgggtcgttgcgagcgtttttttcggttggggacgtgcgtgcgagcgcgcgcgtgggggtttcgtgttttacgcgggtttatgggtattaggcgtgcggcgtttttttttgtcgttttaggtgtagggggagggggcgcgcgcgttaggtgggagggtattcggagagaggtttatcgtttacgcgggttttgtttatttatcggagttatcgtacgtacgatttgggtcgattagtcgagggcgggagtcggaggaggaggtcgagggggttgggtttgcgttgtcgttgtcggttgaagtttgttttcggtcgttggtttcggacgaattggaagtttgagtagcgggggcgggagttagagattagtgggtagggggtgttcggattttggatcgcgggagggtagagagcgtggagggggtagggcgtaggagggagagggggtttgttgttattgttattcggtttttttagttttcgtcgcgagtttgggaaaagttttggggtggattgttgcggggattttttttttttgttgggttatttgcgtcgcgttaatttcgttcgttttcgttcgcgtttcgttcggtgttcgttttttttcgttcggtcgggtgcgcgcggcgcggagtcgattatattagttcgggtttggtcggtcgcgtgttttcggagtttcggttgttcgaatggggagtttagagtggcgagcggtattttttttttcgttagtttttcgcgggaaggtgatttttcgaggtagttttagttcggggatttagagaattatttttatttttttttattgtttttagattttatttttgtttagtgttaggaggaattttttgacgttttttttttttatttattttttttttagtttggagagaagtttttgttatttcgtttatttttatttttttttgcggagaagatttatttaatttttttttggttttagagtttagggaaaggatgattattgttagaagtcgtggcgcgggagtttattgggcgttttgttatattttatcgaaagtttcgatttggtgatagtgtgttttttttttttcgttaatagtttcgagtgagttgtgttttagttttcgtgggggtgggttaagggaggatttgaagagttattgttttattttatttttttggagaaatggtttgaaatttgttgtgatacgggtagtatgggaatagttttttttgaattttggaaaggagtttttgttagttttgtatatattttgttttggtgaaaggtagttttggagtaggtgtttttttggaattttaaatttgtttatttaatttgtttttgaaagggattttaaagggttttttttcgtttttttttgacgtttttttttagttagaatttttttggagaggaggtaagaggaaagttatggataggggtcgttgttaatatcgtaagttttttagattttggtataaaggttttggttataggtttttaagtagggaggagggggaggagtggttgtttggttatagtgtgatttttagaggtttttagagaaggatatttggtttttgtttgtttagaatcgttttttttgtgttttttggttttggaaggggtatgaaattttcgtttttttttttttttggggtttaggaggagtggagggtttcgggagaatattgttagggggaaggtagggggtgttatgggaatgggtgagggggttgaggtgtagaatttagggggtttttgtaggagtcgtagtggtaagttgtttagttggaagtttggtaattgttgtttttttttgagaggggttttttgtgattttggttgtttttgggagtagggttggggtatttgagtggggtgtatttggggtgtgtgggaaggagagggaaagaaagatggatagtgggatttttttttagtagggtttggtgtttcgtaggttagagtgtttttttgttttgcgagtgttgggcgggaggggagttggtgagagttggagatttttaggaagggttggtagaagtttttttttttgggtgttgttaggttcgtatgttttggcgtgttgatttttatagtttttggcgaggggaggaatgatttgatgcgggtggggagggttagaggaggttttaggtttaaggtggtgtagggggttttttaggggttgggtagtgttaaggtataaaagttttttttggtttttggtggtatttgaaggtgtttaggtgagaggggtttggtatttttttattttgggagggagaagaaattagggaataggtaggagtgggagataggtgaggttttggaaatttattgaggttttggagagatttgtgtagagaggaaaatgtggtttttttttagggtttttttttgggtttttattttttaagtaatttgtgggtatgttgggttatttttaaggattagaagagtttggatgggggagggtggttggtgtttttcggttttcggtattttttttcgtttttaatattagtttattttggtatttgttatgttagtaggagaaggttattatgttgtttttttcgtttttagttttttttttttgttttagtttaaatttgtttttttatttgattttaatatttattatggttttggattagggaattagggggatagtgagagtagggagagggaagtgtggggaaggtataggggatttcgatagtgaagtattttggggttttttttttgtatttcgagttttttagtttttaatatttggttagtttttaattttttcgggtttataattatagtagtttaggagtggtgggtatattttgtgttcgtggggattttcggttgtgttttgttcgatttagaagatttggagaagttagaggttgttggtgggagggaagtgaggagggaggaggggttgggtggttgggtttgtgtattttagtttttgtttatgtttatgttttgttttttttttgtttttagt

SEQ ID NO: 86 - DNA, 8111 bp, Artificial Sequence
  chemically treated genomic DNA (Homo sapiens)
attgaggatagaaagagagtaaggtatgggtatgggtaggggttggggtgtataggtttagttatttagttttttttttttttttattttttttttattaatagtttttggtttttttaagttttttgagtcgaataggatataatcgggggtttttacgggtatagaatatgtttattatttttggattgttatggttatgaattcgaggaagttaaagattaattagatgttgggggttggggagttcgaaatgtaggaggaaaattttagaatgttttattgtcgaggttttttgtattttttttatatttttttttttttgtttttattatttttttagttttttggtttaaagttatggtaagtattaaggttaaataggaggataaatttggattggggtaggaaggaaggattaggggcgagaaaaataatatggtgatttttttttgttgatatgataaatattagggtgagttggtgttggagacggaggggggtgtcgaggatcgaagggtattaattatttttttttatttaagtttttttagtttttaggaataatttagtatgtttataggttgtttagagggtaaaaatttaggaggagattttgggggagaattatatttttttttttatataaatttttttagagttttaatagatttttaaagttttatttgttttttatttttatttgttttttggtttttttttttttttagggtgaggaggtgttaagttttttttatttgggtatttttaaatgttattagggattagggaaggtttttatgttttggtattgtttagtttttagggggttttttgtattattttaggtttgaggttttttttaattttttttattcgtattagattattttttttttcgttagaagttgtgaaggttaatacgttaagatatgcggatttgatagtatttaaaaggaaaggtttttgttagttttttttgggggtttttagtttttattaatttttttttcgtttagtattcgtagagtagaggggtattttagtttacggaatattagattttgttaggggagagttttattgtttattttttttttttttttttttttatatattttaaatgtattttatttaggtattttagttttgtttttagagatagttaaggttataggaagttttttttaagagaaaataatagttattaggtttttagttggatagtttattattgcggtttttgtagggattttttggattttgtattttagtttttttatttatttttatgatattttttgttttttttttgataatattttttcgggattttttattttttttgggttttaaggaggaaaggggacggaaattttatattttttttaaggttagggggtataggaggggcggttttaggtaggtaggggttaggtgtttttttttgggggtttttgaaggttatattgtggttaggtagttattttttttttttttttttatttggaggtttgtagttaaggtttttgtgttagggtttgaggaatttgcggtgttagtagcgatttttgtttatggttttttttttgttttttttttaagggaattttggttgagggaaggcgttagagaggagcggaaagggattttttagagttttttttagaagtaagttgggtgggtaggtttggagttttaaaaaaatatttgttttagggttgttttttattaggataaagtgtgtgtaaggttggtaggagtttttttttagggtttaggaaggattatttttatgttgttcgtgttatagtaaattttaagttatttttttaaaagggtaaagtggggtaatgattttttaaatttttttttgatttatttttacgagagttaaagtatagtttattcggaattgttggcgagggaagggaagtatattgttattaagtcgggattttcggtggaatgtgataaagcgtttagtgggttttcgcgttacgatttttgatagtgattattttttttttggattttggggttagaaaggggttagatggatttttttcgtagagagaaatgaaaataagcggggtgataggggtttttttttaggttaaaaaggaaatgggtgaagagaaggggcgttaggaaattttttttagtattgggtagaggtagggtttggagatagtaggaaggggtagggatggttttttggattttcgggttggggttatttcgagaggttattttttcgcggagggttggcggggggaggggtgtcgttcgttattttgggttttttattcgggtagtcgaggtttcgggaatacgcggtcggttaggttcgggttgatgtaatcggtttcgcgtcgcgcgtattcggtcgggcgggggagggcgggtatcgagcgggacgcgagcggggacgggcggggttggcgcggcgtaggtggtttagtagggagggggggttttcgtagtaatttattttaaaattttttttaaattcgcggcgagggttgaagagatcgagtggtagtgatagtaagtttttttttttttttgcgttttgttttttttacgttttttgttttttcgcggtttaaggttcgagtattttttgtttattggtttttggttttcgttttcgttgtttagatttttagttcgttcgggattagcggtcgggagtaaattttagtcggtagcggtaacgtaagtttagttttttcggttttttttttcggttttcgttttcggttggtcggtttagatcgtacgtgcggtgatttcggtgggtgggtagggttcgcgtgggcggtgagttttttttcgggtatttttttatttagcgcgcgcgttttttttttttgtatttaagacgatagagggggacgtcgtacgtttggtgtttatggattcgcgtggggtacggagtttttacgcgcgcgttcgtacgtacgtttttagtcgggagaggcgttcgtagcggttcgcggcgttagtagggtacgatcgtttattttggtatggtggaggtagagtagtaaggtaaggttttaatgtatttaagatagtagaaagtttatggtttcggaggttcgatcggggtcggcgcggttcgcgtttttttttcggttcgggttgtggggcggttcgtttttttcggcgtttcggcgagttatttttttttttcggttcgaggttcgggttagggtttggggagcgcgcgcggttggagtattgtttgcgtatatcgtcgttttattcgtttatgagttcggttttcgagcgtcgagtcgttattgcggttttttttttttttttttttttttttttttttttttttttttcggttgcggtttttttcggttcgagttagtatttttcgcggtttcgttcggttcggtttttttcgcgcggattacggttttttcgaagcgagaatagtttagaagttggacgaaaagttttagtgcgacgtcgcgagtttcgattttttttatttcgttttcgggcgcgggtttcggtttttgttcgcggttcgtcgtcgcgtttattgttcgtcgtcggtcggggaggaggtggtagttggggttgggggcggtgtttgtttgtttgttcgttagcgcgattggttagttgcgggattttaagggggagggtttacgtcgcgtttcggcggttatttttaaaagtaggttatttattttgtttttgtcgttttcgttgttcgtacgttcgcgcgttttttttgatttcgtttttttttttttcgatttttttttggagtttttgttattttttttttttttttgttggtttttaaaatttatagtgatttggggaagtagagtaatttttttaagtcgtcggttcgatttaagtggggaatggtaagtaaaaataaattaaaacgagaaataatatagttttaaaaaaaaatgtttaagaaaaaagaagagggataaaattcggattaatgaatattaaattttagtatcgagcgttttggtcggtgagttcgttgatcggtttatttaatcgttgcgtttttcgatagagcgttggtgttagtttttagcgttacgattttcgagttattcggttgttttaagttttcgcgatttttttcgttattagtcgatttttaaaaaaaaaaggggggggcgtatggtttcgtttcgtcgggatttcgttttcggttcgtttcggggggcggggataggcgagttttagtttttttatacgcggttcgggttcgggttttgcggacgtttagtgaagtttggttcgtagttcgtcgtaatgaaggggaagttcgatttttattaaggtttatagtttgaaaattatttattcgttttcggaaattttgtttagagatacgcgttcgcggggtattggcgaggagggagtaggaaagtgaggttacgtgcggatagggtttgagagtcgttttttttttgttaggaatattgaagggggtaggggaaggcggagagtcggatagggacgggtggggagagggatatatagatttattggaattttggagtgatttttggtttttttttcgttttaacgtttttaattttatacgtatatatttatttatttatatagatatatacgtttttattttcgaagacgttgttcgttttatttatttagtttttttgtggtggtcgagcgttttttagtgattgtcgtttgtatatttcggttttggttaaagagggaatgggttttggaaagggggtggggggagtttgtttttggattttttatttttgattttttaaatagttatatatttgggattggagttgttttatgtatagagagtttagggttgggtataggggttatagtgtgtttttttgataatgtgttatttggagtttttatttggtttgtagatattaaagtgagcggtagttaataggttggagtgattggggttttttgggaagtgtttagggatgttttttaggggagaagaatttggtattaagtttgtggagttgagaacgggaagttgtgtggtttcggggttagttagtgattgggagggaagaggatttgttggagtttacgtatgtattgtggagtttggtaaaatttaaagggggaggtagttgggtagatagaggtttttgtttttgttgtttttttaattttagatgttgttagggaattgaggttagggggttggtgggggcgggtggaggttagggtttgcgtgatgatttaaatttattcgttagtattaaggaacgtttgtaggttagttgtttagagtttttattaggttaggggttaaggtttttattagtttaagtttagatttatagtttattttttgaatagaaatgggggtttcgttttagtttttttatttttttaggattttttggttatttttttaggtttatagttttttttttattttttttttagtttttttttttatttttaagttttttttttttttaattttttatattttttttaagtgtttttaaaggtttttattttatttttgtatataggaagtagtttggaaaaatttttggttggtttttgatttggttatttttaggttgttttagggaataaagttggggttttgaggtttgtgggaagagtgggattagttagtttgattatttatttagattttgttagggtttggtttatagttggtatagtttttgtggaggtatggattgagaatgggaatgtagtaattttttttaatttaattaaaacgttttagggagtttatttagttagttttatttttagtatatgttgttgtggtttggtggaggtgttaggttatttttttagtatttttagttttatcggtatggtgttttaaggtttttatgaggaaaagggttggtttttatttattttaattttttttttttattattcgtgtattagttttgtttttattatttggtaggttttttagtagtagggataaggtttttgtatagttagtaaatgtttattttttggtttagggtttttttttaggtaggtttttttatttgggttttatgttttaggttgatgaacgggatatggaagggaagttattaatttttttttttgtgcgtttttagtattttaggagtataagttgtagatattttggggtaggatggaggttttgagttttaagggtttattttggtttttttttttgtatttttttttaattcggttttttttagtttttaaaagagttaatagatttgaaagagtaggttttagtaaaaaataaataaataaatttgaagttaagaggaggttggaggggttttaaggagggatagttattattagttatttcgtggttttaggtattttttatttttataagttaattgttttttatggtggtatttagtaaggtgtgttataataatttgtttgtgtttttttttggggttttgtttagggatttaggggagtgagggtatagaattttttttatataaggttaggattataatttggtttaggggtttttgagttatttttattagggcgagaaagtatggtttattttttttttttattgtggagatataatttggttgtgatttggaggggttaattttggattttatgttttagtgtgttgttatcggtatttataataatgtatttttaaggatttagttagtgtttatattgttattaaattaaaagtttaagttatttagttatttgagtttttaaaaaaggggaaaaagtataaaataataattataagattatatgtatttttgtggtatttttttttttatgggtttagttttttgaataatttgattttatttatttttatttttttttttaggttgtttgttgtaggggaaggggcgttagagtagattgtttttttaaagaatttttcgaaggtttagagagggtataaaggggtttagggttatttagtagattgggggaaggggtagtgaagtagagagtagtttatatagaggttatgttggtttttagttgaggggtaaattcggtttcgtttggagggttttattttgggagcgtagtggttattttttatagtttgtggttttgaaggtagtttagaaggagttaaggaggaaggggaaggtgttttaggtgagggggaaggggagaaaggggtgggggtggagaaaagtgcgaaaggtagttaggagttagcggcggttttagataaagaaagtagtgattgggttaaggtataatagttgtattttgttttgatgttttgttatttttaatatttagggaaattttcgtttgtgtgggtgtgggtggttaatttagaagtcggtggatgaagggataaaattttttttgagattggaaagaaggtgaggagagagttattgggttttgttgttttttatatatttttttaagtggttttattgtaatggaaggaggttttgttttttattttattttttgatttttaggtgattagtaggatattgatttgtaggaagggtaggatataaatttggtgaattgaaggagagagaattgggttggttttttttaattttttgattttgattgtgggttaatttttgttttttttttttttttttttttttcgtttaggtttttgtaataaagtattaaaaagataaagagaaagtaaaggaaagggtttttttggtttagtgttaatgttttagttttatgtggatttggaggtttgatttgaggtaatgataagtaatgatggttaattgataaaaagattggagtagaggaagttaaggagggtaatttttttaagaggatttagttaggaaagggggaaggaatggggaagaggatttagttggagagagggtagggtagagttattgtttggggaagtttatttatttatattatttttaggtttattagtttttgttttttttttatgggttttagtttaattttttgatattaagttgtttttgatgaattgtatttttttaatatttttaggtatgtttattttttgatattttaatttttgttatttttttaagtttgattttaaaatatgtttattt

SEQ ID NO: 87 - DNA, 11523 bp, Artificial Sequence
  chemically treated genomic DNA (Homo sapiens)
attgtttaagacggaaagattttaagattgtgtgattttttttttttttttttttttttttttttttttataggtgtagaataattttttttttttttttcgtggttttttttttttttattttttttttttgttgtttgtaaagttgaatttggggttaggagttttaattgtaattttagattggaattttagatggtgcgtttaggattggaagtaatttttagtttattaattttatgggtttacgtatttgttttggttacggtttggtttttatttttattgtggtattaatgtagaataaattgagatatattttttatataattagttttagaatttaaaaagatttacggtataataatagaggtagtgtcgcggaatttttttattgaggattttcggggagttcggggattatttcgcggtggtattagaatagacgagtaattttagcggttttaggtattgcgaattgggggagagggggaaattttgtatcgtattcggtagtatttaacggtttcgggtttttagatagggttagcgaggagagttaggatagtaagtggggattggttaaaaaaaatcgatttaattttgaaatgattagaagaagttgggagtagttattataaagttttttttttgtttttttttttttttaattgaaggaatgacgttgaaatttttatcgttagcgcggggttgggaattattttaaatatttgttttgtagtttcgagtgggtagatttcgaagagttggagtcggcggggaggggaggaatagttgttgggttgttttgcgcgtggggttcggggcgcgggtttcggggagaggcgttagtcgaaagtttgtttttttttcgcgataggtagtagcgaggtcgagttattttttattacggtttgcgggtttcgcgcgtagtgtggttgttttcgtttttgatcgatcgtagcgttttggggtgtttatttagttgttcgcggtcgttgggtgattttcggagggcggtttaggcgtgcgtattggtttttggggttgcggttgtagtagtttagtttcgcgttttgttagatgtagtggatagcgtcggggtgaaagtaagggttgagaaatttttattgttttgtttttatttagtttcgatttttttatattgtaataattatgtattttcgaggtcgggatgtttgcgttttgttagtgtattaacgttatatggttttttaggggttgttttcgtttttgtattttattagttttgaagaggtagaggggtggtgggtaaaatttttaattggacgttgagagattcgggttttagttcggcgttgttattaatttgttttttgtttttaaatagtagtagtaataaaaattgtaaagttgattgagttaaaggtttatattgtttttttatttaatttttagaataattttatgaggtgggcgttagtattttattatttcgtttgattagtaaggaaattgaggtttagagagattgcggaattcgtttagggttatatagttgttggttatttggtagagttgaggttttattttggggttattaattttttgttttttatcgttgcgttttatagattgtttttttttcggttgtttgggttttagtttttttttttgtaaaacgagaagtttaatttgtagttttttttgttaatcggtggtttagattaggaatttttgttatagatttcggcgttgataggggtaagaaggtgggtgaaagaagggggcgtttagttttttatagtttgtttttttttgggatttcgcgaagggcgggtttcgcgagttaaaggaggtataggagagcgtttatcgttcgcggcgggtgaaggtgttatttgttttcgtgttaggttgtgagttttggtgtttagtttagggcgttaaggttagtgtagttggtatgttttttttggaaaattttaggtttttcgtagagaacgttatttataataaagaagaggatagagaggtatggagcgttttgcgattgtaggagtacgttagttttttagcgttggtttagtgtcgtttgggttttcgggtatgtggattcgttggggtcgtacggagattttttgtcgggtttttggggtttttcgattgcggttttttagtttagtattttttttttggtttcgtaggttgtagggaattttttttatttttttagtcggagaagtttaagtcgggcgagggggtatttcggggttcgtatcggtgtttttttttttttcgtttttataaggattttgagaaaataaatggtagaggagagaggagttttatatttgtttggtttttttttttttttatttatttttatattttttatttcggggtaaaaatttatttttgaaaaatgttggtagagatttacgtgtttttgttttatttgggttttataaatataacgatttatatttaagttagtttttttttagataatttttttttttttcgttaaaagtgttaaggatggtaaaagaagaaataattttaattttttcgtttggaaatgaaagttttcggttttttataaagggtttttcgttttttatagttgagttttagttaagaaaaacgatttttaagtagaaataataggcggggagaaggaagggagatatagggatttggggggtttttagggtaattggtagtgaattttgtttcgagagttttttttttatttaaaaaattaaacgcgcgagtttcgcgaaaggtttagggatagatcgtgtgggagaggattgagtagagagcgtgggggtagtgttttgtagaatttttttttttttaataataattttaaaagtttttgagtggagacgacgtaaagttaagtagtaaaggtggtttgggaggtaagcggagggtttaagtgtcgtatttttatttttagggttttttgcgtttacgggatgcgtatttttaagaagtgcgtttttcgagtaagttttgggttcgtatatatttcgggttcgtagttagaatttaatggcgataacgtttatgtaatgtaagttaaaaattaaagcgtaaaaaattattatgttatttattgaaacgttattttttgttaaattgtaattattttgttttatataagtttggttggaaagtttgtagttttagttcgggttagttaggtataggaggtcggattgtaatcggttgtttttttttcgtcgcgtttggtcgttttacgttgcgtcgtcgttgttgttttttggcgtttttgggattttatacgtatttttgaaatacgtttcgtttcggttttcggtttttttttttgtttaggggttgttttttaatagatattgatttttttagaagatttaaaaattaaattaaaatattttttattcgttttaaatatttgttttggggcgcgggggttgttaaatagagattagacgaagggagttagatttagcgaagtttttcgagtttttaaagattcgaatattaattcgcgttcgtgggtcgatggaggttttttttattttattttttggtttttttaattggttttcgttttttggttaattattgagtaattagaatggtattttcgattagggttataggtagtgttcggcggagtggttttaggagttattcgttttttgtcgggtttcgtatttaaatttttttttttattttttttttttaaattgggcgttaggatgtttcggtcggaatatacgtaggttttgggcgtttgtttaagggttttttttttttttaaattagtcgttgttttttcggtttaatcgtagaagaattagatattttttattggaaagggaaattaagtgttgttgattttaattttaggtaggcggtaatcgtttttcgtttggcgtaaattttattaagtaaataattattagtcgatcgaaatacgttcggtttataattggtgtaattttcggttatttaattgagggacgttcgtttttagtttcgatttttggaatttataaagggttatttttttttttagtgattttaagattatggttatttttttattcgatagttttagaagtaagagttagatttaagggtgtaaagtaagggtatacgtttttttgaagtttgattgagttttttttgcgtttttttgaagttttcgtttttttggagtttatttgtttttttttttaaattatttttttagattaataattttatttttatttttatcgtattcgattttgttcggatttattgtttatttgaacggattttttagtgagacgaggtttttatattggcgaaggttaagaaggggaggtggggggagggttgtgttatatcggttagttgagagcgcgtgttgggttgaagaggagggtgttttcgagagggacgttttttcggattcgtttttattttagttgcgagggcgtttttaaggagtagcgcgcgttgtttggtcgggtttgggttgttgagtgaatggagcggtcgagttttttggttttttttttttttcgcgtcgtcggttttttttatttgagttttgggaagttgagggtagttaggtagttggggtaaggagtttaaggtagcgtttatattcgggggtttttcgtaattcgatcgtttgttcgtttttttatttttcgtttttttttttatttatttatttatttatttatttatttagagtcgggacggtagtttaggcgttcgggtttcgtcgttttttcgtcgcgattttggatttttttttgttgtaggattcggtttttacgtgtgtttcggagtcggcgttttagtatacgtttcgtttcgggtttgggtgtttatagtagttagagtagtagggagttcgggattcgggcggtatttgggttaagttaggcgtcgtcgaggttagcgttgaacgtttttagggtcggaggagtcgcggggcgttcgggtttgagtcgtagtaaatgggtttcgacgtgcgggatttgaacgcgttgttgttcgtcgttttttttttgggtggcggcggcggttgtgttttgtttgtgagcggcgcggcgtagtgggcgtcggtgttggattttgcgttttcgggcgtttcggtttacgggtcgttgggcggtttcgcgtcgttatcggtttcgtcgttattttcgtcgtcgtcgttttatttttttattaaataggagtcgagttggggcggcgcggagtcgtacgaggagtagtgtttgagcgtttttattgtttattttttcggttagtttattggtatagtcggagtttgtcgttacgggtttttcggttttttttcgtttagttaggcgttattcggttaggttaggatgttttttaacgcgttttatttgtttagttgtttcgagagttagttcgttattcgtaattagggtaagtaggtcggggagcgttttttacgcgcggggtagtggcgttagggatttttcgttttaggatattttttttttttattttttttgatcgtagtttttatttagttgttttttaagggtcgtgaggatagcggaagcggcggttggggaggaggtcggagagtgggagtgtacgtaggtattggttttcgatattttttaaagttaggtagagttaggagtttgattgttcgtaagagtcgggagggcgtttggggttttttagagttcgagagatttcgggattgttagtttttacgggagtggaattaggagatcggcgtagtgtttggttttgttttggggagagttttgttaattaaggaaacgttaaattgttattaagcgtagcgttttttagacgtttggattttggattcggagtgggattagcgcgggggtgagcgtttgtgttgtgttgttttcgtagcgttaaaatgtttaggagtatttttagtttttataatacggtgttggtatatatttaggtgtatattaagtatcgtagagaattagaatgagtatatgtatttttagtaattaaatggttttttggaatagcgtcgtgttcgtggatagttttcgcgtatggtaatatagaagtggatttttattgggtttcgtttaggcggcggttacgtaggttttggggatggaagagaatttgatttattcgagtttaagttatgcgggattaggttttatcgtaggtagtggaaggaggtacgagttttggttttttttttagcgtatttggggcgtttttttattttgtaaacgcggggtttagttgggatagtatttttttaagatttggggttagaataaggatagggttattcgttgtgtttagttaggatataaggagggaattcggtatacgataagtattaggttggttttttatttcgcgtcgatgttcgtttatttttttttcgtttgggcggcgcggattcgaatttgcggagtttttgtagtttgttttttttatttatttttagtggatttttacgttattgagaatttaagttagttcggtttgattcggtaatttagtaaacgttttattaatataatggcggatgttttttttggagtaaaattattcgagggtttagggatcgggatgtttttggaatgcgtgggaagtagagtgtattttttgtaggaggtattttcgtttaaggttcgggagaagggttttgtttttgttgttcgtttttattcgcgttttttaaacgcgcgtttttaggtcgtttttattttagtttaattaggagtattcggttttcgcgaagttttggagaaatcgaaatcgttttttttttcgggagaatttgggattattgttttgtggaggaatcgtaagtagatttaagggttgtttttattttatgtttttagttagtgaaattagtgttttgtatttaaggggcgttgggataatttattggtcgttgaggtttgtgttttttgattagatcgcgttatttttgtttagtaggttggtgttatttttggggagtttttaggttttagtgttttcgtttataagaggatagttgagatgggtaatttggagattgggttcggtttgaagttatattttatagatgtagaagcgttatttattatttttttggggttttaaatatggaattcggtaatttatttaaatatttgtgattgagaaataatgaattcgagagtattgtttgtatgtgtgttatttggaggcggttgagaaattatcgaatttatgtttttggggtataaaatattattacgttattatttttttagtatttttaggggatttttgaaatttgggttttgtcgtttcgtttgggttttttgtttagttttttttagggtaggtttggtgtttgggattttattatatgtcgtggggggtgggattgtgggttttgtagttagtaggtattatatttttggaaaatatttggatttttttgtaatatataggcgtggttgttatggagaaaaagttaaaaggggattaggattagtaggtgaatgtattttttttttttattttggagaaaaagtttaatggagagagggttttagatttaagttatatagtttggaagtattatttttaggtttaagttttgttttgtagtgaaaatagatgggtttattttatttagtttttgaggtttattgggtagtttggatgtgagaagcgtttcggttgttattttggagtgggtaagggtggttttcgagattttgggtttattttttggatttttagggtttttgttgtttttttaggaatgtagggtttggtttaagatttgggttgtgagaggtaagggtattaatttttaaaaatgtggaaatggttattagagcgttaaggttaaattttaggggagaggaattaaggtcgtttttggatttttagggtagtttagttatggtgtataggtaggggtaattgttggtatttatttataatcgtttaaaattttataagtatgtttatattttaaatttttaaatattatattttgtattttaattttgtaaatattaatttagtaaatattaatcgtttatttggttaggtattgggttttgaatattaattaagataatggtttcgagaatttttgtaagaagtttattagttaattttggagaggttttttgttttggatgaggaaatttaggttttatgagattaggtggtagaggtgggatttgaatttagattatgttagggtgtttttattttttttttagggattttggttttatcgttgagatggattttttttggtttgcgggaggggtattaaatttttagtttatgtgtgggggttgacgggtttgtgagggtagatgtggggtgaggatttgagtagttttagattagatgtaaggtttaaggaggaggggaaaaaagtttgtttgggtcggacgcggtggttcgaggcggttggattatttgaggttaggagtttgagattagtttggttaatacggtgaaattttgtttttattgaaaatataaaaaaaaaaattggtcgggtttggtgacgggcgtttataattttagttattcgggaggttgaggtataagaatcgtttgaattcgggaggttgaggttgaagtgagttgagatcgcgttattgtattgtagtttgggcgatagagcgaaatttcgtttcggaaaaaaaaaaaaaaaaaagaggttgtttgttagtttattgatttcgtagtttcgtaggttcgtagaattttaaggtatgattaggtttgggattattaggttattttagggttaggtgcggaggtttgcgacgttcgagggttaaaggttttttttttcggttatataggagagggtattttgttgggggataggttttttttaattatagtgtagttgtagttatcgtttttagttttttgagtatttttttggttgagtttgttgtttattttattttttagtttttacggttcggttaggttaggcggttttcggtttttttgtagtcgtcggcgggggaggagggtatagagcgcgtttcgttttttagcgtacggttaaggttgcgtttttttttcgggtcgggattaatcgtgggaaaggcgttattttggttattcgattttttttttttaaggtttgtataaggagtttttgaatacgttgttttttttagtcggtagttttattttttttggtttttgttttcgtatttttcgcgttaggttaagcgttgggtttagggatagcgcgttttaattaaattcgtgttcgataagtttttaattaaaagagattttttttcgtttcgtaggcgtttttattattgtttttttcggggggatttgaaggagagggtttgaggtcggtttttgttcgtcgaggtttgcgtgttcggtttgggaggaggtttaggagggttcgcgggttacgggtatttttgggttcgagttttggggtgcggacggacgtttcgagagtgggtgtcgcgattcgggatttacggttttcgtcgggtacggatagttgcggagtagggttttgaggattgtgtagtgttttgggtttttgtttatttttgggtttaggaatggagaagggttcgtttagagaaaattttttcgtagtttttatttcgtttttttttttttttttttttttttttttttttttttttttttttttttttttttttttgtgtttgtttttttttttttttttttttttttagtgtttttttagaaattcggtttttatttcgggtaatagtgggtgttttgagttaaatttcgtttgtaagtttatttataggttttaaagaaggttaggttttaggttttaaaaggaagtttgtggaagtttaaacgtgttcgtttatgtaggagagttaacggggtcgggggttatttttgtttatttagtaggagagaaatggaggttttcgaggttatatgataaaagttagtggttttttaaatttttagtgtgtggtgttgagtagtgtgtgagatttaagtttggatttgtattattcgggagttaggatttgtttttttttttttttttttgtattttgttatattattttttaggtttatgtttttgttgttttagagaagttttttttttttttttttttttttttttttttttgggcggggggtggtggtgtgtgtgtatgagcgttcgtgtgtgtttcgaaaatggaggtaacgatgttttgggttttgtttatcggttgagttttgtttaagtttttggaggtattttggttaaatagtgtaagagtgggagaatgggtgttgtttgatttaatttatttttgagaattttgtgaagtttggagatttagggtagttttgggttaggaggatttgaggttgttggggtggttttgttaggattttataggagtagttttttttagttattgtgtttggattttaggttatagatttcggaatttgtagaggaatgagattttatttttgggtttcggggttaatgacgtatttttagtcgaaggatttttttttttagaggtagtaatagttttttagaagtttgtggggtataagtttaaagtaatttaataataaaaattataaaagattatgttttttaattgaggttttacgtttttttttttattttgggggggggggggaatgttaggatttttttagggggaaattgaggtaaaggatcgaagtattattatggagggaaagggagatatagtgttaggtatattttaaaggaaattggttgtttagtttggggagtgaggaagttggtttttatagtagtggttagggtcggatttttgggcgtaaggtgggttttataggggggaggaggaggagagcgtagggtcgttatttgaaggtttaattggaaggggtttttgtttttttttttattagtttttttttgggtgttatggtgttaggtcgggtagttttagatagataatattattcggtaattattttttttatttttaagattaggttatttaattggtttcgagtaattaatgaaagttggtgcgcgggtttttgatttatagttcggagttaacgcggggttagtttagtagatttatttcgtttgttcgcgttgtttttgcggaagagttgtagtttatttttggggggtgaataattttttttgtcgattaggtaacgagttttatatttaatttgttaggggttcgttgtagaagcggtagagatcgtagaagattgcggtataaataaattgggaaaaagcgaggtgggggttttagttagaaaaggatggagaagtttgttttaaggttatatttagggatttgggtcgtttttttgtcgaaagttttggaggtttgtggggttggattttttttcgttgggggttcgaatgcggggtttagcgtatatttttttcgttcgtggttggtttagatttattgtttcgttttgcgagagtatcgttgatattgtgttttttttcgtcgttttcgtagg

SEQ ID NO: 88 - DNA, 11523 bp, Artificial Sequence
  chemically treated genomic DNA (Homo sapiens)
tttgcgggagcggcggagagaagtatagtgttagcggtgttttcgtaagacggggtagtgggtttgaattagttacgggcggggggggtgtgcgttgaatttcgtattcggatttttagcggaggagaatttagttttataagtttttaggattttcggtaggaagacggtttaagtttttggatgtgattttgggataggtttttttatttttttttgattaaaatttttatttcgtttttttttaatttatttatgtcgtagttttttacggtttttgtcgtttttgtagcgaatttttggtaaattaagtataaaattcgttgtttgatcgatagagaaggttgtttattttttaaaaataaattgtagttttttcgtaggagtagcgcgggtaagcgaaatgaatttgttgggttaatttcgcgttgatttcgagttgtaaattaggggttcgcgtattaatttttattaattattcggagttagttaaatggtttggttttaaaaatgggaagagtaattatcgagtaatgttatttgtttggggttattcgatttgatattatgatatttaagggaaagttggtgagggggaaaataagggttttttttagttgggtttttagatggcgattttgcgttttttttttttttttttttatgggatttattttgcgtttaggggttcgattttgattattgttgtaggagttaatttttttattttttaggttggataattaattttttttagagtgtgtttgatattgtatttttttttttttttatggtagtgtttcggttttttgttttagtttttttttagggaaattttagtatttttttttttttttaaagtgagaaaaagagcgtggagttttagttggaaaatatagttttttataatttttgttattaaattgttttaaatttatattttataagtttttggaaagttgttgttgtttttggggaaaaggatttttcggttaaagatacgttattggtttcggaatttaaggatggggttttatttttttataagtttcggagtttgtggtttgaagtttagatataatggttaaggagagttgtttttatgggattttggtagggttattttagtagttttagatttttttggtttaggattgttttgggtttttaaattttataaaatttttaggagtaaattgggttaaatagtatttatttttttatttttgtattatttgattaaagtgtttttaaagatttaagtaggatttagtcgatgagtaggatttagggtatcgttatttttattttcgaaatatatacggacgtttatgtatatatattattatttttcgtttagaaaaaaaaaaaaagaaaaagaaaaaaaaaaagtttttttggggtaatagaggtatgagtttggagggtggtgtggtagagtgtaagggagggaaggagggggtaaattttaattttcggatagtataggtttaggtttaagttttatatattgtttagtattatatattggggatttgagaagttattagtttttattatatgatttcgagggtttttattttttttttgttaagtgggtaaagataattttcggtttcgttagtttttttgtatgggcgagtacgtttgggtttttatagatttttttttgaaatttgaggtttggttttttttgaggtttatagatgagtttataaacgaaatttggtttagggtatttattattgttcggagtgaaggtcgaatttttgaaaggatattaaaaagagagagagagaaagagagatagatatagagagagagagagagagggagggagagagagagagagagagagagagagagagagagacgaaatagaagttacgaagaagttttttttagacgaatttttttttatttttgagtttaggagtaggtagggatttagggtattgtataatttttagagttttgtttcgtaattgttcgtgttcggcgagggtcgtgggtttcgagtcgcggtatttattttcgagacgttcgttcgtattttagaattcgggtttaaggatgttcgtggttcgcgagtttttttaggtttttttttagatcggatacgtagatttcggcgggtaaagatcggttttaaatttttttttttaggttttttcgggaggggtagtggtgaaagcgtttgcggagcggagggaggttttttttaattagaagtttatcggatacgggtttgattagagcgcgttgtttttgggtttagcgtttggtttggcgcggagagtgcgggggtaggggttaggggaggtaaagttgtcggttggaaggagtagcgtgtttaaaggttttttgtataggttttggagggagagaatcgagtggttaaggtagcgttttttttacggttagtttcggttcgggaggggagcgtaattttgatcgtgcgttaagaggcgagacgcgttttgtgtttttttttttcgtcggcggttgtagagaagtcgggaatcgtttggtttggtcgggtcgtgagagttgaggggtgaaatggatagtaggtttagttaggaaggtgtttagaaggttgaaaacgatgattgtagttgtattgtgattggggaaaatttgttttttaataaaatatttttttttgtgtgatcggaagagggagtttttggttttcgggcgtcgtaggttttcgtatttgattttagggtggtttgatgattttaggtttaattatgttttagggttttgcgagtttgcggggttgcgggattagtggattagtaggtaatttttttttttttttttttttttcgagacggagtttcgttttgtcgtttaggttgtagtgtagtggcgcgattttagtttattttaattttagtttttcgggtttaaacgatttttgtgttttagtttttcgagtagttgggattataggcgttcgttattaagttcggttaatttttttttttgtatttttagtagagatagggttttatcgtgttggttaggttggttttaaatttttgattttaggtgatttaatcgtttcgagttatcgcgttcggtttaagtaagtttttttttttttttttttaagttttgtatttagtttggggttatttaagtttttattttatatttgtttttataaattcgttaatttttatatatggattaagagtttggtgtttttttcgtaggttagaagaaatttattttaacggtggggttaagatttttggaaaaggagtagaaatattttagtatggtttgggtttaaattttatttttgttatttaattttatagaatttggatttttttatttaaaataaggggtttttttaggattagttggtgagttttttgtaaaggttttcgaggttattgttttaattaatatttagaatttagtgtttgattaagtaggcgattgatgtttgttaaattaatgtttataagattaggatgtaagatataatatttaagaatttaaaatatgaatatgtttgtgaagttttgggcggttgtgagtgggtattaataattgtttttgtttgtgtattatggttagattgttttagggatttagagacggttttgattttttttttttggggtttggttttggcgttttgatggttatttttatatttttgagagttgatgtttttgttttttatagtttaagttttgggttaggttttgtatttttggggaagtagtaggaattttggaaatttaaagaataaatttagaatttcgagggttatttttgtttattttaggatagtagtcggagcgttttttatatttaagttgtttaatgagttttaagggttgggtaagatggatttatttgtttttattgtaagataaaatttaaatttggagatggtgtttttaggttatatgatttgaatttagggttttttttttattgggttttttttttagggtggagaagaaggatatatttatttattagttttggtttttttttaattttttttttatggtagttacgtttgtatattatagaagaatttagatattttttagaagtgtaatgtttgttggttgtaaaatttatagttttattttttacgatatgtgataagattttaggtattagatttgttttgaaaagggttggataagggatttaaacgaagcgatagaatttaggttttaaaaattttttagaagtattaaaaagataatggcgtagtagtattttgtgttttaggggtatggattcgatggttttttaatcgtttttaaatagtatatatgtagatagtgttttcggatttattgttttttagttatagatgtttagatgggttgtcgagttttatatttaaagttttaagagggtggtgggtagcgtttttgtatttatggagtataattttaagtcggatttaatttttaggttgtttattttagttgtttttttatagacggggatattgagatttagaaattttttaaaagtaatattagtttgttaaataaaggtggcgcgatttgattaaagaatataagttttagcgattagtaagttgttttaacgttttttgagtataaaatattaattttattaattaaaagtatagagtggaggtaatttttgggtttgtttgcggtttttttataggatagtgattttagattttttcgaagaaaagggcggtttcgatttttttaaggtttcgcgggggtcgggtgtttttggttaggttaaggtaggagcggtttgaagacgcgcgtttagaaggcgcgggtgaaggcgggtaataagggtagagtttttttttcgagttttgggcgaaggtattttttgtaaaagatatattttgttttttacgtattttaaaaatatttcggtttttaggttttcgagtaattttgttttaggaaaagtattcgttattgtattagtaaagcgtttattaaattatcgaattaaatcgaattggtttaggtttttaatagcgtggaaatttattgaaaataaatgaagagggtaaattataggggtttcgtaggttcgggttcgcgtcgtttaggcgaaagagaggtgggcgggtatcggcgcgggatgagaaattaatttgatatttatcgtgtgtcgagttttttttttgtattttgattaagtatagcgaataattttgtttttgttttaattttaggttttgaagaaatattgttttagttgagtttcgcgtttataagatgaagaggcgttttagatgcgttgaaagaaaggttaaagttcgtgtttttttttattgtttgcggtagaatttggtttcgtatagtttggattcggataagttaagtttttttttatttttagaatttgcgtggtcgtcgtttgagcgaagtttagtgaagatttatttttgtattattatacgcgggagttatttacggatacgacgttgttttagaaagttatttagttattggaggtgtatgtgtttattttagttttttacgatatttaatgtgtatttaagtgtgtgttaatatcgtattataagggttggaggtgtttttggatattttagcgttgcggaggtagtatagtataggcgtttattttcgcgttggttttatttcgaatttagagtttagacgtttgaaaagcgttacgtttggtgataatttggcgtttttttaattaataaaattttttttaaggtagagttagatattgcgtcggttttttggttttattttcgtggggattagtagtttcggaatttttcggattttaaggggttttagacgttttttcggtttttgcgaatagttaggtttttagttttgtttggttttggaggatgtcgggggttagtgtttgcgtgtatttttatttttcggttttttttttagtcgtcgttttcgttatttttacggtttttgggaagtagttgggtaagagttgcggttaaaaggggtaggagaggggggtgttttagagcggagagtttttggcgttattgtttcgcgcgtagggggcgtttttcggtttatttattttgattgcgaatagcgggttggttttcgaggtagttgggtaggtagggcgcgttaggaaatattttggtttggtcggatgacgtttggttgggcggaggaggatcgaagggttcgtagcgataggtttcggttgtgttagtgaattggtcggaaaagtggatagtgaaggcgtttaggtattgtttttcgtgcggtttcgcgtcgttttagttcggtttttgtttgatgaaggagtgaggcggcggcggcgggggtggcggcggagtcggtggcggcgcggggtcgtttaacgattcgtaagtcgaagcgttcgggggcgtaaagtttagtatcggcgtttattgcgtcgcgtcgtttataggtagggtatagtcgtcgtcgttatttagggaggggacggcgggtagtagcgcgtttaggtttcgtacgtcggagtttatttgttgcggtttagattcggacgtttcgcggttttttcggttttggagacgtttagcgttggtttcggcggcgtttaatttggtttagatgtcgttcgggtttcggattttttgttgttttggttgttgtaggtatttaggttcggagcggagcgtgtgttgagacgtcggtttcgggatatacgtggaagtcgggttttgtagtaagaggaagtttaggatcgcggcgaggagacggcggggttcgggcgtttgggttgtcgtttcggttttgggtgggtgggtgggtgaatgagtaggtgggagggagggcgggaagtgggggagcggataggcggtcgggttgcggagagttttcgggtgtgggcgttgttttgaattttttattttagttgtttggttgtttttagttttttaaagtttaaataagaggggtcggcggcgcggggaagaggaggagttaggaggttcggtcgttttatttatttagtagtttaagttcggttaggtagcgcgcgttgttttttgggggcgttttcgtagttggggtgagggcgggttcgagggagcgtttttttcggagatatttttttttttaatttaatacgcgtttttagttggtcggtgtggtataattttttttttattttttttttttggttttcgttagtgtgggagtttcgttttattggagagttcgtttaggtaagtagtgagttcgggtagggtcgaatgcggtgggagtagagatggggttgttaatttaaaagagtggtttggagggaggggtaggtaggttttaagagggcgggaattttaggaaagcgtagaaagaatttagttaagttttaaagaagcgtatatttttgttttgtatttttgagtttggtttttgtttttagaattgtcgggtaggggagtggttatgattttggggttattggggaaagaggtggttttttgtgggttttagaggtcgggattgaaagcgaacgttttttagttgggtggtcgggagttgtattagttataagtcgggcgtatttcgatcggttagtagttgtttatttggtgaggtttgcgttaggcggaaggcggttgtcgtttatttaaaattggagttagtagtatttagtttttttttttagtgaggaatatttaatttttttacggttaagtcgggaaaatagcggttagtttaggagggaagaaaatttttgggtaaacgtttaaagtttgcgtatatttcggtcggagtattttggcgtttagtttggggaggaggggtgaaggggagggtttggatacgaagttcggtagggagcgggtaatttttggagttatttcgtcgagtattgtttgtggttttggtcgaggatattattttggttgtttagtgattgattaggaggcggaagttagttaaggggattaaggagtggagtagggagaatttttatcggtttacgggcgcgagttagtgttcgaatttttgggagttcgaagagtttcgttaaatttgatttttttcgtttagtttttgtttggtagttttcgcgttttagagtaggtgtttggggcgggtagggggtgttttggtttggtttttggattttttaaaggagttagtatttattgggaaataatttttaggtaaggagaagaatcgggggtcggagcggagcgtgttttagaggtgcgtataaaattttaggggcgttaggaggtagtagcgacggcgtagcgtgggacggttaggcgcgacgggagggaagtaatcggttgtagttcggttttttgtatttggttggttcgggttggggttgtaagttttttagttaaatttatgtgaagtaaagtagttgtagtttgataaagaatggcgttttaataaatgatatagtaattttttacgttttggtttttagtttgtattgtataaacgttgtcgttattaaattttggttgcggattcgaagtgtgtgcgggtttaggatttattcgaagggcgtattttttgggaatgcgtatttcgtaggcgtaggagattttgagggtaaagatgcggtatttgagtttttcgtttgttttttaggttatttttgttgtttgattttgcgtcgtttttatttagaagtttttaaaattattattaagaaaagaaagattttataagatattgtttttacgttttttgtttagtttttttttatacgatttatttttaaatttttcgcggggttcgcgcgtttggttttttgagtggagaaaggattttcgagataaaatttattgttagttgttttaagaattttttagatttttgtatttttttttttttttttcgtttattatttttatttggaagtcgttttttttaattaggatttaattgtgaggggcgaggagttttttatgaaaagtcggggatttttatttttaaacgaaaagattgagattgtttttttttttattatttttggtatttttagcggggggagaggaggttatttgaagggaggttggtttgaatgtgagtcgttgtgtttgtgaaatttaggtaaggtaaagatacgtaaatttttgttaatattttttaaaaataagtttttgtttcggggtgagggatgtaggggtggataggaggaaaggagagttaagtaaatgtagaattttttttttttttgttatttatttttttagaatttttgtgggggcggggaggggaagagtatcggtgcgaatttcggggtgttttttcgttcgatttggattttttcgattaaagaggtgggaggagttttttgtagtttgcggggttaagaagaaagtgttaagttgaggagtcgtagtcggaggattttagggattcgataggaagttttcgtacgattttaacggatttatatgttcggaagtttaggcgatattaagttagcgttggggaattgacgtatttttgtagtcgtagggcgttttatgtttttttgtttttttttttgttgtgggtaacgttttttgcgggagatttgaggttttttaagggggatatgttagttatattggttttggcgttttgagttaagtattaggatttatagtttagtacgaaggtaggtagtatttttattcgtcgcggacgataggcgtttttttgtattttttttagttcgcgaggttcgtttttcgcgaggttttagagaaaagtaggttgtggaaaattgggcgttttttttttttatttatttttttatttttgttagcgtcgagatttgtagtagaggtttttggtttgaattatcgattggtaaagaaagttgtagattaaatttttcgttttatagagaaggaaattgaggtttagatagtcgaaggagaggtagtttatggagcgtagcggtaaagagtaaggggttggtggttttagaatggaattttagttttgttaggtaattaatagttgtgtgattttagacgagtttcgtagtttttttgagttttagtttttttattggttaaacgggataatgggatattagcgtttattttatagagttgttttgaggattagataggagagtagtgtgggtttttgatttaattaattttatagtttttgttattattattgtttaaggataggaaataagttagtggtaacgtcgagttgaaattcgggttttttaacgtttagttggaggttttatttattatttttttatttttttagagttaatgggatgtagaggcgaggatagtttttggaaaattatgtggcgttgatatattggtaaagcgtaggtatttcggtttcgaaggtgtataattattgtaatatgaaaaaatcgaggttgggtaggagtagggtagtgaggattttttaatttttatttttatttcggcgttgtttattgtatttgatagagcgcggagttgggttgttatagtcgtaattttagggattagtgcgtacgtttgggtcgtttttcgggagttatttagcggtcgcggataattgaataaatattttaaagcgttgcggtcggttaagggcggggatagttatattgcgcgcggggttcgtaggtcgtaataaagagtggttcgatttcgttgttgtttgtcgcgggagaggaataagttttcgattagcgttttttttcggggttcgcgtttcgagttttacgcgtaagatagtttaatagttgtttttttttttttcgtcgattttaatttttcggaatttgtttattcggggttgtagggtaagtgtttaggatggtttttagtttcgcgttggcggtgaaaattttaacgttatttttttaattaaaaaaaggggggggtaagggaggggttttgtgataattatttttagttttttttgattattttaaaattaagtcgattttttttaattagtttttatttattgttttaatttttttcgttgattttatttgggagttcggaatcgttaggtattgtcgaatgcggtgtaaaattttttttttttttttagttcgtagtgtttggagtcgttggggttattcgtttgttttgatgttatcgcgagatggttttcgagtttttcgagagtttttagtgaaaggatttcgcggtattgtttttattattatatcgtaaatttttttaaattttggaattaattatatagaggatatgttttaatttgttttgtattaatgttatagtggggatggaggttaggtcgtggttagagtagatacgtaggtttatgaaattgatgaattgagagttgtttttagttttgagcgtattatttggaattttagtttgaggttataattagaatttttgattttagatttaattttgtaaataataggggaaaaaaatggggaaaagaaaaattacgagagagggaaaaaaaattattttgtatttgtaaaaaaaaaaaaaaaaaaaaaaaaaaaaaaaaagttatataattttaaaattttttcgttttagataat

SEQ ID NO: 89 - DNA, 6500 bp, Artificial Sequence
  chemically treated genomic DNA (Homo sapiens)
tgggtttgagttttttttttttttttggaaattttaatgtcgagaatagatttttattttttttgttttttgaatgtttttttttttttgtggtagtgatatagaacgtttagttgattatgaggaaagggttatgaggtaaaagaacgtatatggaagaaaatttttatttattaaaatagtaaaatattgttttttagtagtatagatgataaaaaatagtttttgataatatttgttgtttattgattttaataatagaaataaagtatgtttttaaaaatgattgataggatatgtgaaatataaaatattagtttaaaatgtgtttagaaaatggatttagttagttttaggtgagtaacggttttatttatagaggttgttcgtgggtaaaattggaagatgttagtttggaaggtgtgtggttatggtcggaaggtattattatgtaagtataaatattagtttcgttgtgttgtatgatatttaatgtgtttgttggattttttaataaagtaaagagaggtgttaagattggaagtgggaaaagaaaggttttgaatttgtttgggaagtgtacggggttcgtttgtgtttattaggggtgtgttacgggggttttttaggtttttttgtttttagtaattaagaggttaatttgaattagtttttttcggaagtagagtgttttttaggagaagtttttttgttttttttatgatttaagggtttttttgtttttttaaattattttttttaaataataaggcgttaaatttttttaataaaattttttgttttacgaatatttataaaacgtaaaaagtataagtttcggtggaggtaatatattgaaagttattttgttggaagtataattagaatttttttttgggtttttgtttttgttaggttgcgttggaattgtttgtaggtattatagttatgtttgtttttggtatgtaagtttttttatatagtttgggtaatatagtaaaattaggagattatagtaaaatttgtaaattaaaaaatatatatattcgggtatgatggtatgtgtttgtagttttagttatttaggaggttgaagtaggaggattttttgtgtttaggagtgtatggttttagtgatttgtgattgtgttatcgtgttttagttagggtgataaagtaagatgttgtttttaaaataaataaataaataaatgtatatataaatattttgatttttttcgtttaatgttgaaatttattatgtgaataaatattagtagtgtgttttaatttttaatattttaaatgtatatttgtatataggtattatgttattattattattagtatattttttattgtttttttttattttttgttatttttattttttagtaatttttattttttatttttagtttggtaagagattaagtttataagagtttttattaaaattttaaaaggttaattttttattttgtttttatttttatatggttttgtttttattagtatttaagattttatttacgattgaaagtagagtttttttttattttttagatgttttgtttatttttttgttggaagaaagttattaagtattgggttgggcgggtggatatatgttttgtcgagcgttatttttttttttgtttgtgtaagtgatattaggattttgtgattataggtagtttatgttttcgagggtatgtaaggttttttttttttgagaaagttcgtggaagtagaggatagtgtatgagtttttatggaaaattttttgttaaggattttagttatgattttttttatagaataggataattggagagtagttaaggagaaatatattttttatttagaaaatatttaaaattttgattggtaaaattaagtgtaataaagatgatattattttttgaatttatatattaattaatatttaatttagtttaaatgtttatttaaaattttttggtgatgtttaaataattgaataatttgatagtaaaaataaatttagatatataagtagataaaattttattttttaagtgattgtagaattatatattagtttatttttaaaaaatgaagattaaataaatatgttatagtgtggatattttataaattaaagttattatgagaatttaatatatgataaattagatttagtaatataagataaataatggagagaagaaaatatttatttaagaattagtattgggatatttaagtatgatatggagaaaagtgaaattagatttatatttttatataatataaaacgtagtgttagatattttaaaaatagttatttaaagtagaagaaaaaaattgatatatgtattagagtaaatagattgttatatttataaaagagatatatttatattagaatatgaaatagattattattatattatagatttgtttataatattaatagaatgatataataaatattaaaaggaaaataataaaatgaaaaatatttaatatatatttattgttttaaatatataaagaattgttgttaatataaatattttgtttttattttagtagtagttaaggaagattaaaagtttatataaaagggaaattttgttaaattgttaaattaaattgaattatatggaatatatatagttttatagtaattaagtaaatataaattaaaatttataaataatttataaataattaattttttatttttttaaagttagtgttggagaagagtgtgagagaaagtttatttatataattggtgggttggtatttttgaagagtaatttgttaatatgtagtaaaagttataaaattttaaaaattttaaatttatttattttatttgggaaatatatgagaagaaaaaatttagaggagaaaatgaagtttgtgtaagttttaatgtagtagtattagtttttttttttttttttttttttttttttttttttttttttttttttttttttttttttttttttttttttgagttagagtttttttttgttgtttaggttgaagtgtagtggagtgattttagattattatgatttttgtttttcgggggtttcgtgtttgagttttttgagttgttgggattttaggtatgagttattacgttaggttaatttttgtatttttagtagagatggggttttgttatgttggttaggttggtttcgaatttttgatttatgtaatttgttagttttagttttttaaaggtgtgagttattatattcggtttattttttattataaaaataagatataattttaatgtataattaaaaggaaaatggaggtataaaagtaagtgttttatattataggatgggatatagtatattattataattaaaaaggtttattgtgtggattatgttgatttatggaaattagtaagtgaagttttgataaagtggagtaagtgacgaatatattgaattgtaaggtttttggagatgggttacgtttatttatatttaatttatagggttatatttagtttttggtatatagtatatgtttagtaagagtttgttgaatgaatatatatatggtttatttgtttgtttttttcgagtttttgatttttgtttgttttgatttttggtagttttttattagtttttagtttttattttgtttatttggatttcggaattttagtttgttttatttttagataaacgtatgttttttgtggttttggaattttagtgatttttgttatattaaagtttttacgtttagggtgatacgtagttgtagtttcgtaaatttttaatatgatgttagtaaatattaaaaaaaaaaagtttataaaataatgaataaattttgttaaaggtataaatgaaaattagtaaatatgggaagataattgagtgaagagtttaaagttaaaaacgaattgtagttattttaggggaaggaatagttgtatttgaaaatttgtatggttatatgaattgtttaaaaaataagttaaggaaaattaaagtttagatttatatattttaagaaattaattgtaattaattttttgggattaaatagtatttttttaattttagttgttattaaaaagaggtaaatatagttaaggattggattttcggaaggttgatagtattgatttttaagaaggtatcggttgatagatagaatattttgttttaatatgtgttgaaatttcgttgagagtagagtggtatattgaattttttaggggtttataaaagaagtgttttgtgttttagagttatagagttttgtagaaataagtatgaatttatttagtggttttttgtattaggttttttttgtgggtattgagtgttagatatattaatatgtaatagtagaatgaatgattgaacgaacgattgaatgaaaagaaatgagaggtagtaggttgttagattttatgaggtaattatagtattaggtgattttagtatttatttgagaggattgttatttattttcgggagcgtacggttttaaagaggtttatatttaggtagtgagttttggtggggggcgtttttagatgtaagaaggaggaaatagttcgaaatttttgggtttgagcgcggttcgtgtaggtcggagggttaagaattttttatcggcggtagcggttcggtgtttgtttcggtttcgtttcggtttaaggttgtttgtgttataaatacgcggtttatatgtcgcggtgatacggtgttttttgggttcggcgggatagataatatgaatgtgttttttaaacgttttaagttgtagggatagttttcggtttagtttcgttttcggaagcgttttcgttttcgatgttttttgtagttgggaggagggggcgtttcgtatttgtttagttaatgcgcggcgcgagcgtcggtcgcgattcgttttttttcgcgagagttcggcggggatataagggggagttgcgggttaggcggcggttttttagcgtcgcgtagggtcggggattgcgcggcggtgttaggtcgggcgtgggcgagagtacgaacgggttgtttgcgggttgagagcgtcgagttgttattatgggtgattacgtttggagttttttaaaggattttttggtcgggggcgtcgtcgttgtcgtttttaagatcgcggtcgtttttatcgagagggttaaattgttgttgtaggtgaggatcgcgcggtgtaagaggcgggcgcgggcgcggcgggtcgggcggggcgcgcgatgcggcgcgagttgtagggcgcggggcgtcgcggaaaatttgcgttaggttttagggtcgggcgttcgttcgttcgttcgtttttcgttcgcgggggaagaaggtgttttttgcgtagagataggtttagcgttagtcgtagatttttggtgtcgggtggcgttcggcgttcgggtgtttatatatggaaatttattcggagtcggtttacgtgtgttagattttgcgttcgtgatagtacgggcgtgtatttaggttcggaggtatttagtgattgttagtatttttggtatcgttttatgcgtacgtatttttataataaaaatattaaaataattattatttaagaatttttttatcgtattttatgtataatgttgtatgtaggttgacgtttttatttttatgtaatttttgtgagagagttatttttttttattttatagatgaagttgaggttttgaaatattaagaaataattttcggaataaatttagattattttgtttttaaattttttttttttttatttggtcgttgaatggtttattattttttcgtgtttttttttatttgtttaaaaggttagggttttttaatgaggaagagtttaatttgggagttagaattattaataataaaatttttataaattgtttataacggtagtaaatttttaataattgattatttggattatttgtttgaaaattttggaggtttaatgtttagtggatttatttttttttttttattagagtatttagtagagatttttatttttagggtgattagagtgatattgagaaattgttattttttggttattatgtttattaaatttaaagttttttgaagtagggagtgttatttatttttgttttttagtaagttttttatatagtttttaaatttagggaaagtgaaataaataaatggttatagttttatataatttaattatttttttagtttatttggggtaatatttttttttttaaatattttaataattgaagtaatattggattattttggtttgttatttagtaattaatatggataatagtatttatttatacgtttttagtatttatttgatttttttattttttttttttttaaaaaaaaaatttaggaagtgtaaattttttttttttttttgttttttttttttttttttattttgtttgttttttgttatttatttttttttttattagg

SEQ ID NO: 90 - DNA, 6500 bp, Artificial Sequence
  chemically treated genomic DNA (Homo sapiens)
tttggtggaggggagggtgggtgatagaggataggtagggtagagagaagggaagaggataggagaaaaaaaaaggtttgtattttttagattttttttttgaagaaaaaaaggatgaggaaattaaatggatattgaggacgtgtaaatggatattgttatttatgttagttattggataataagttaaaataatttaatgttgttttaattattagggtatttgagggaaaaggtattgttttaaataaattgaaaaggtgattgaattatataaagttatagttatttatttattttattttttttaggtttgagaattgtatgaggggtttattgggggatagaaatgagtaatattttttgttttaaagggttttggatttaatagatatgatggttaaaaaatgataattttttagtgttattttgattattttggagatgaggatttttattagatgttttaatagaggaaggagaataaatttattaaatattaggtttttaaagtttttaagtagataatttaagtaattaattattaagggtttgttgtcgttgtgagtaatttgtgggggttttgttgttagtaattttgatttttaaattgggtttttttttattgaggggttttgattttttgggtaggtggaggaaaatacgagaggatgataaattatttagcgattaggtaggggaggaaaagatttggagataggatgatttgagtttatttcgaaaattgttttttaatattttaaaattttagttttatttgtaaaatggagaagaataatttttttatagaggttatataaagatgaaggcgttagtttatatatagtattgtgtatgagatacgataagggaatttttgggtgatgattattttgatgtttttattgtaaaggtgcgtgcgtataagacggtgttaaaaatattggtaattattaggtgttttcgggtttgagtgtacgttcgtgttgttacgggcgtaggatttggtatacgtaaatcggtttcgggtgggtttttatatatagatattcgaacgtcgggcgttattcgatattaggaatttgcgattgacgttggatttgtttttacgtagagggtatttttttttttcgcgggcggggggcgggcgggcgggcgggcgttcggttttggggtttggcgtagatttttcgcggcgtttcgcgttttgtagttcgcgtcgtatcgcgcgtttcgttcggttcgtcgcgttcgcgttcgttttttgtatcgcgcggtttttatttgtagtagtagtttgattttttcgatgggggcgatcgcggttttggagacggtagcggcgacgttttcggttaggaagttttttaggaagttttaagcgtgattatttatggtgatagttcgacgtttttagttcgtaggtagttcgttcgtgttttcgtttacgttcggtttggtatcgtcgcgtagttttcgattttgcgcgacgttagggggtcgtcgtttggttcgtagtttttttttatattttcgtcgggttttcgcgagaggaggcgggtcgcggtcggcgttcgcgtcgcgtattggttgggtaggtgcggggcgttttttttttttagttgtagagggtatcgggggcgaaggcgttttcgggagcgaggttgggtcgggggttgtttttgtaatttgggacgtttaaagggtatatttatgttatttgtttcgtcgagtttagggaatatcgtgttatcgcggtatgtgggtcgcgtatttatagtataggtagttttaggtcggggcgaagtcggggtagatatcgggtcgttgtcgtcggtggagagtttttgatttttcggtttgtacgggtcgcgtttaggtttagggatttcgagttgtttttttttttttgtatttaaaggcgttttttattagagtttattgtttggatatgggtttttttagagtcgtgcgttttcgagaataaatggtagtttttttaaatagatattaaggttatttgatgttgtgattgttttatagaatttgataatttgttgttttttatttttttttatttaatcgttcgtttagttatttattttgttattatatattgatgtgtttggtatttagtgtttataggaaagatttggtgtagggggttattaggtgaatttatatttgtttttgtaaaattttgtgattttaaaatataggatattttttttgtaagtttttaaagggtttaatgtattattttgtttttagcggaattttagtatatattagggtagaatgttttgtttgttagtcggtgtttttttgagggttagtgttgttagtttttcggagatttagtttttggttgtatttgtttttttttaatgatagttggggttgaggaaatgttatttaattttaggaaattaattgtaattaattttttaaaatatataaatttgagttttaattttttttagtttgttttttaggtagtttatgtaattatataggtttttaaatataattgtttttttttttagaatgattgtaattcgtttttaattttaaattttttatttaattatttttttatgtttgttaatttttatttgtatttttaataaagtttatttattgttttataaattttttttttttaatatttgttgatattatgttagaggtttacggagttgtagttgcgtgttattttgggcgtggagattttggtatagtagaagttattaaggttttagggttatagagggtatgcgtttatttaagagtggggtaggttagagtttcgaaatttaggtaagtagaatgaaagttagaaattagtggaaagttgttagaggttagagtagatagaagttaagaattcggaagagataaatagataaattatgtatgtgtttatttaatagatttttgttgagtatgtattgtgtattaagaattaggtgtagttttgtggattgaatataagtagacgtggtttatttttaaagattttatagtttagtgtattcgttatttgttttattttattaaaattttatttattgatttttatggattagtataatttatatagtaaatttttttaattataatagtgtattgtattttattttgtaatatagagtatttgtttttatatttttattttttttttaattgtgtattagaattgtgttttatttttatgatgaaaaataggtcgggtgtggtggtttatatttttgggaggttgaggttggtagattatataggttaggagttcgagattagtttggttaatatggtaaaattttatttttattaaaaatataaaaattagtttggcgtgatggtttatgtttggaattttagtagtttaggaggtttaggtacgagattttcgagaggtagaggttatggtgatttgagattattttattgtattttagtttgggtaatagagaaagattttgatttaaaaaaaaaaaaagaaagaaagaaagaaagaaaggaaggaaggaaggaaggaaggaaggaaggaaggaaaattaatattgttatattgaaatttatataaattttatttttttttttaagttttttttttttatatattttttaaatggaatggatagatttaagatttttaaagttttgtagtttttgttatatattgataaattgttttttagaaatattaatttattagttatatagatgggtttttttttatatttttttttaatattggttttaaaaaaatagagagttggttatttgtgagttatttatgagttttagtttgtatttatttaattattatgaagttgtatatattttatatgatttaatttaatttgatagtttgataaggttttttttttgtataaatttttaattttttttgattattgttggagtgaaagtagagtatttatattaataataattttttatatatttgggataataaatatgtgttgaatgttttttattttgttgttttttttttgatatttattatattattttattagtgttatgaatagatttatggtatgatgatgatttattttatgttttgatgtaaatgtattttttttatagatatagtagtttatttattttagtatatatattagttttttttttttattttgagtagttatttttaaaatgtttaatattacgttttatattgtatggaggtatgggtttaattttatttttttttatattatgtttgggtattttaatattaatttttaagtagatatttttttttttttattatttgttttatattattaagtttagtttgttatatattaagtttttataatagttttaatttatgaaatatttatattatgatatatttatttgatttttattttttaaaaataggttgatatatgattttataattatttaaaaaataaagttttatttgtttatgtgtttggatttatttttattattaagttgtttaattgtttaaatattattagaagattttaaatagatatttaaattaaattaaatattaattaatatatgaatttaggaagtagtattatttttgttatatttaattttattaattagagttttggatattttttaaatgggagatatatttttttttggttattttttagttattttgttttatagaaggagttatagttggaatttttgataagaggttttttatggaaatttatatattgttttttgtttttacggatttttttagaaaagagaggttttatatgttttcgggagtatgagttgtttgtggttataagattttggtattatttatataggtaggggagagaatggcgttcggtagaatatgtgtttattcgtttaatttagtatttagtggtttttttttagtaggagaatggataaggtatttaggagatgagaagaaattttatttttaatcgtggatgggattttagatgttggtgggaatagggttatgtagaaatgagagtagggtggaaagttagttttttggaattttagtggaagtttttatagatttagttttttattaaattgggaatagagaatggaagttgttaaagagtaagagtgataaggaataaagaaaaataataaaggatgtgttaatggtggtgataatataatgtttgtgtgtaagtgtatatttaaagtattaggaattagaatatattattagtgtttgtttatatggtaagttttagtattaagcgaagaggattaagatatttatatgtgtatttatttatttatttattttagagatagtattttgttttgttattttggttggagtacggtggtataattatagattattgaaattatgtatttttaggtataagggatttttttgttttagttttttgagtagttgaggttataggtatatattattatgttcggatatatatattttttaatttgtaggttttgttgtggttttttggttttgttatgttgtttaggttatgtggagaagtttatatgttaggaatagatatagttgtggtgtttataggtaattttaacgtagtttggtaaggataaggatttaagagggggttttggttgtatttttagtagagtgatttttagtgtgttgtttttatcggaatttgtattttttacgttttatgaatgttcgtgaaataaaaagttttgttagaaggatttggcgttttattatttaaaggaggtgatttgagggggtagaggagtttttgaattatagaaaagatagagggattttttttagaaggtattttgttttcgggggaaattgatttaggttggttttttggttgttggaggtagggaggtttgggggattttcgtagtatatttttgatagatataggcggatttcgtgtattttttagatagatttagaatttttttttttttatttttaattttagtatttttttttattttgttgaagagtttaataagtatattgagtattatataatataacgaagttaatgtttatgtttgtataataatgtttttcgattataattatatattttttaggttggtattttttagttttgtttacgggtaatttttgtgaataaaatcgttatttatttggagttgattgggtttattttttaaatatattttgaattagtgttttgtgttttatatattttattaattatttttaaaaatatgttttatttttattattaaaattagtaggtaataaatgttattagagattattttttattatttgtattattgaagaataatattttgttattttaatgaataagggtttttttttatatgcgtttttttattttatgattttttttttatagttagttagacgttttgtgttattgttataggaaaaagaaaatatttaggaagtagaggaagtaagagtttattttcggtattagaatttttaaaggaagagaaaaaatttaagttta

SEQ ID NO: 91 - DNA, 5546 bp, Artificial Sequence
  chemically treated genomic DNA (Homo sapiens)
aggaaggatatatagatatacgggagattgtggtaattggcggggaagggtggttttgggaaaagagtaaatgaaataggttttttggagggtttttgagtttaatagttaaaaggttttcgtttaattttcgagttttttttttgtattttatttgtagtgggtttttggtgttgatcgttaggatttggtatttgaagtagtagagtttatagttttaggagtttttttcgttgatttagcggatgaggtagggttgatgcgtgtagcgtattgagtcgtcgtagcggtaggggtttaagagttttttttggaggaagagtgaggaggggttttgttagttattattatttcgattttatttagtcgcgtttttcgatagggaaattttttttttaggttatttttttattttaaataatttaggttttttatttaagatagggtaagaggttaagtaaggttgtaatagaaaagaagttttttttggagattaagggaaattttttatattaaagagatgaaagatggaaagggatggggggattagaggggagaagggttgggttttttttttttttagaatttgggatgggtagtttttaagattttttaaaagaaaggtttttttttaggatttggagggaggggagtgttagagtttttgagttatgtttttttttttttattttattattgtaaagttattttatagatttggcgtaaattgggatgggttatggttttcggtttttacgtattaaaaaggggagaaatcgcggaggtgggagtgaagggtgtttttttttaattatggaattaatttttattatatagagatattttttggtattattttgggataattttgtttataaaattttaataaagaatattttttagaatgagatagaaagttgtagaatgggaagtgaaaaaaagtgttttacggggagaaatattgagttaagtaagggcgttggttgggtttttttttttaaggggggtatagaagtatttttttttttgtttatttgtaagagaataggtttttttagtttacggagattttggggcgagggaaataggagagaatagtagtttttgttaatgggtgagagggattttgcgtttttcggggagaaagttttatttttttttggggatttttgatttttcgatataaataagcgttttaggagttttttgttagtttttcggttttattttatttttatttcgtgttttggggttcgtttagtttttttaggcgtcgcgtttgttcgcggttttcgttgatattttaggtgcgcgtttttatttttcgcgttcggttaggtgtttaggtttgatttgtttcgggttttggaagtagattcggtattgaggggttcggagttcgttgtttaggttattgttgagcgatagggcgtttagcgcgttcgggggcggtagcggcggcgcgggcggcggtaggggttcggttcgcggttttttgtcgtcggttaggtttcgggttcgcggtttcgattcgtagtattttttttcgtcgtcgtcgtcgtttcgggtggagtagttagcgaagggcgtttagtcgtagtcgttttttcggttttttcggggttgcggttcggttcggggtcgtttttcgtttgttagtattagtagttttagttcgtttagaaatatgcggagtcgagatttgagtatcgttcggatatcgggggcggggggtagcgtgtaaggggggttcgttagcggcggggggaggggagaggataaggtcgggaagggggcgcgcgttagagagtcgagtcgggtcggggttttcggggtttgcgatagtcgtttattgttgttatcgtcggggtttcggtgtttgcggggtcgagcgggttggcggttcgggggcggcggggtgggcggttatggttagggtagggggcggggaggggggtttagggtgtcgtatttcgcgggtttgggtttggagcgggtcgggttttcggggttacgcgttcgggtttttttgcggcggggtcgttttttatcgtcgttttttcggttttagttttttttcggtttcgggattaggtttggttcggttcgtgcgttcggcggtggtaaatgtcggtttttttcggcggcggcggcggcggagattttttcggagtggcgggcgggcggggcgggcgtcggggagcgggtgaaggatggagggaggggcggggcggggagggggagaggagaaggggtcgcggttgcgtattttcgcgggtgtttcgtacgagtaggtgtttttaggggcgggggtaagtgtgggatttcgaggagggtggaggaaggggagtggttaaggaaggggagtgtgtatataagttgattaggtgtgtgtttgggagtgggggatgagcgggtgagtatggaaggtgagtggttaaatgacgtaggtgtattagggagggtgaggtttgtgtaaaatgggaatgtgtaaagaaagagttgtgtaagtgtcggaggtgtgagggaggtatatgggtaggggtgggatttagtaatatatttttatttaagggttgaaaagtgtgatcgatggggattgggaaagagaggtgtgtaaggaatggatcggaaagttttattattgggaaagagggtgtgtaaggaatggaatcggattgtttgagaaatagaagtttgtgattgtaatgtgtgaaggaggtgagggagggagtaggggaggtaggcgtgttaaagggatgggagtgttttttttggtatttttttgtttttatttttattatattgaagtgaataatatatatatttatttttttttttttatggagatttttttttgaggttaagttttatttttattatattttttttttttttatatttatattttttttttttttttttttgtaaagttgagggaaaagggattttaggggagtttattgggttaaatatattgggaaaaaatttaattagtgaaagagtaattaatagaagaagggaggggatagagtttgggatagattgttaaattaaggttttttaatagaaagtgatggagagatagtaatgtttttatgaagtatttaaatgttttggatggattaatgaatgaattagaaaaaggggttgggatttaagtagatagagaggacgttttttgttgtaaagatagtaagttgtgaaggttttatgtggaaggtgaggttgaagtggggaatgttggtgtgggaagggagtttgaaaaatttatagataattattttagttttttagaaggtttataaagtatttatttttagtaaggtagttaataaaatatttattttttgagttttttagttagtttagtttttgaggttttttttattagtgttttagttgtttttgttaggaggggtttagggttataagtattaggatggaaagaggaggtatttgtattaatatgtattttattttgttttaagttatggtttatatttattttttagtttgaatttttatatttttagttagatggttaaggaaaatagaagttagagtggaaggagtggtaaatagggtaataaaatggttttagattttagataaatttttataaatgagatattaatcgttttttttttttatttttatatttttaaagggttgggagataaagattttggagttaataaaataaagtaggagaaatttatttgtgtttatttaggtgtttgggtagaggttatttgggaataagtgtgttttggatagtgttaagtgttaagaaagcggtattagggaaaaagagggaagtataataattttaaatgagtagttataaggtttgtagaagggggtatgttatttttatttattgtggtggtttggagggtgtagggggtgtggtggtaatttttttgtatatgtgtaattttgtattcgttttatatatgatgtgataaataatattatatatatatatatatatatagaagtatatatgtatatatataaatattatataattatagaatttttttattggaaaaaaaaaaaaaatttaaaaggttaagtatttttgttttttgtttattaataatttttttgttagatggttttaggtttttgtattaatatttttagggaggtttggaagttggaaaagtgagaggattattttgttattgagtttgttggattattgtattaatttgtttttcgttattttttaatcgtagttttgtttttaaatgggtattgtttattttttattgtagaagattttattgttggttatatttttatagatagtcgtattattattttaaagggttagtgatagatattaaaaataaaataaaaatttatatatatattggaagtaagtatttagtaaaatgttgtagaattaatgaatgaaataatgatataaatgagagtatgtttttttatggtggagcgaaaaggtgatagtattatttttggtattttaatttttattttttttttaatgtagataggttgaaagatcggtagtgagattggagtttagtttttagatcggtagtgagataattttttagtcgggagttgggttttgggtggtttaggttgttatggtatcgtttcgggttttatttttttttgttttttttatcgttttttttttgtagcgggggttgtggtagttagttacgtgttcgtcgcgtagttatatttttgttttttagagtaatgttaagcggttacgtgtgatagtaatagattacgtggttgttatcgttttttcgtttttttatatttttcgttttttttttagtcgaagtattttttgttcgttttttagcgtatgggtggcggttacgtgtttagaacgttcggcgttcgtttcgtttttttagttttcgcgcgtttttttggtagttggttatatggtgagggtgggggtgagggggtttttttagtttgcggtttgtgtttatggtcgggttttttgcgtttagttgtttcggatcgagttcgggtgtatggggtcgtaggaatcggtttcggggtttcgataacgggtcgtttttatagtatttcgggttggcgtgaggtaagtgtagtttttttttaggaatgagaattagtgttcgttttttttatagttttttacgcgttcgtttcgcgagttggttatggaagggtcgtttaagggcgggaagtggggtttttgtggttatgggaaagtataattttagggattgaggtgtaggattttcgatgtaaggtatgtgttatgtgtgatttttgtgcggggcgcgattgttttaaaggaaaaagcgttttttattgtagggttttacgtggttggaggggttggtattgagttattgtgttatttttggggtcggttttaaggaagattgggagcgggggatgggatgttggtggtgttttttgcgttttttttttgggagtttttttgttgttgtaggtttatattattttaattttgtaagcgatttttggtgataggagtttgtgattgtagg

SEQ ID NO: 92 - DNA, 5546 bp, Artificial Sequence
  chemically treated genomic DNA (Homo sapiens)
tttataattatagatttttattattaaaagtcgtttatagagttaggatggtatgagtttgtagtaataaagggatttttaaaaaaaaagcgtaaagaatattattagtattttatttttcgtttttagttttttttggggtcggttttagagataatataatgatttaatattaatttttttagttacgtgaggttttgtaatagaaaacgtttttttttttgggataatcgcgtttcgtataaagattatatatgatatatgttttgtatcgaagattttatattttagtttttaaaattatatttttttatgattataaaggttttatttttcgtttttgagcgatttttttataattagttcgcgaaacgaacgcgtggaaagttgtgaggggggcgggtattggtttttatttttgggaagggattgtatttattttacgttagttcggggtgttgtgggggcggttcgttatcggggtttcggagtcggtttttacggttttatatattcgagttcggttcggagtagttggacgtagagggttcgattatagatataggtcgtaagttagagaggtttttttatttttatttttattatgtgattagttgttaaagaggcgcgcggaaattgggagggcggggcgaacgtcggacgttttgggtacgtgatcgttatttatgcgttgaggggcggataggaggtgtttcgattgggaggagggcgaagagtgtaagggggcggaggggcgatggtagttacgtgatttgttgttattatacgtgatcgtttgatattgttttgaggagtagaggtgtggttacgcggcgggtacgtgattggttgttataattttcgttgtagggggggagcggtgagggggataagagagggtggagttcgaggcggtgttatggtaatttaggttatttagagtttaattttcggttgaaggattgttttattatcggtttgaaggttgaattttagttttattatcggttttttagtttgtttgtattggggagggggtgggagttggggtattagaggtgatgttgttattttttcgttttattatgagaaaatatatttttatttgtgttattgttttatttattaattttataatattttattgagtgtttgtttttagtgtgtatgtgggtttttattttgtttttggtgtttgttattggttttttaaagtagtggtacgattatttataaagatgtagttaataatggggttttttataatagggagtaaataatgtttatttgagggtaaaattacgattaaaggatgacggaaggtagattaatatagtaatttaataggtttagtgataaggtaatttttttatttttttaatttttaaatttttttgggagtgttaatgtaaagatttgaggttatttggtagagaagttattgatgagtaggagataggaatatttgattttttaagttttttttttttttttagtaggaaggttttatgattatgtgatatttgtatgtgtgtatatatgtttttatgtatatatgtatgtatatgatattatttattatattatatataagacggatataggattgtatatgtgtaagaaagttattattatattttttgtattttttagattattataatgaatgaaaatgatatgtttttttttgtaaattttgtgattatttatttggagttattgtgtttttttttttttttttagtgtcgtttttttagtatttagtattgtttagaatatatttgtttttaaatggtttttgtttagatatttaggtagatataagtagattttttttattttgttttattggttttaaggtttttattttttagttttttgggggtatgggagtaaaggaggaaagcggttagtgttttatttgtgagaatttgtttaaaatttaaagttattttattattttatttgttattttttttattttaatttttgttttttttaattatttggttgagaatataagagtttaaattagaagatgaatataaattatgatttagagtaaaatagaatatatattaatatagatgttttttttttttattttgatatttgtagttttgggttttttttggtaagggtagttggaatattagtaagaaaaattttaaggattgaattgattaaggggtttaagaggtgaatgttttattggttattttgttaggggtgggtgttttgtaagttttttggaaggttaagataattgtttgtgagttttttaaattttttttttatattagtattttttattttagttttattttttatataagatttttatagtttattgtttttgtaatagaagacgttttttttgtttgtttgggttttagtttttttttttgatttatttattagtttatttaaaatatttgaatattttatgggaatattattgtttttttattattttttattgaggaattttaatttggtagtttgttttaggttttgttttttttttttttttgttaattatttttttattaattaaatttttttttagtatgtttgatttaatgagtttttttggaatttttttttttttagttttgtaaaggggaggagagggagaatgtaagtgtaagaaagaaaaaaatgtgatgggggtagaatttggttttagagggaagtttttataaaaggaaaggggtaagtgtgtgtattgtttattttagtgtagtggaggtgagggtaggagagtattaggaaagatatttttatttttttagtacgtttattttttttgtttttttttttattttttttatatattataattataggtttttgttttttagataattcgattttattttttatatatttttttttttagtgatgaagtttttcgatttattttttatatattttttttttttagtttttatcgattatattttttagtttttgggtaaaggtatattgttgagttttatttttgtttatgtattttttttatattttcgatatttgtatagttttttttttgtatatttttattttgtataagttttattttttttggtatatttgcgttatttaattatttattttttatgtttattcgtttattttttatttttagatatatatttagttaatttgtgtgtatattttttttttttggttatttttttttttttatttttttcgggattttatatttgttttcgtttttggggatatttgttcgtgcggggtattcgcggggatgcgtagtcgcggttttttttttttttttttttttcgtttcgtttttttttttattttttattcgtttttcggcgttcgtttcgttcgttcgttatttcgggggggttttcgtcgtcgtcgtcgtcggaaggagtcgatatttgttatcgtcgagcgtacgggtcgagttaagtttgatttcggagtcggagggggattgggatcgagagaacggcgatggggggcggtttcgtcgtaggaggattcgggcgcgtaatttcgggggttcggttcgttttagatttagattcgcggggtgcggtattttgagttttttttttcgttttttgttttggttatggtcgtttatttcgtcgttttcgggtcgttagttcgttcggtttcgtaagtatcggagtttcggcggtggtagtagtgaacggttgtcgtaggtttcgaagatttcggttcggttcggttttttagcgcgcgtttttttttcggttttgttttttttttttttttcgtcgttagcgagttttttttgtacgttgtttttcgttttcggtgttcggacgatgtttaagtttcggtttcgtatgtttttgaacgagttgaagttgttggtgttgataggcggggggcggtttcgggtcgagtcgtaatttcgggggggtcggggaggcggttgcggttgggcgtttttcgttggttgttttattcgggacggcgacggcgacgaggaggagtattacgggtcggagtcgcgggttcggggtttggtcggcgataaggagtcgcgggtcggatttttgtcgtcgttcgcgtcgtcgttgtcgttttcgggcgcgttggacgttttgtcgtttagtagtagtttggatagcggatttcgaattttttagtgtcggatttgtttttagggttcggagtaggttaggtttgggtatttggtcgggcgcggagggtggaggcgcgtatttggggtgttagcggagatcgcgagtaggcgcggcgtttaaggaggttgggcgggttttaggatacggagtgggaatggggtgaggtcgaggggttggtaggggatttttggagcgtttgtttgtgtcggagggttaagggtttttaggaaggggtggggtttttttttcggagagcgtaaaattttttttatttattaatagggattgttgtttttttttatttttttcgttttagggttttcgtaagttaaggggatttgtttttttgtaggtgggtagaaaggagagtgtttttgtgttttttttgaagggaggggtttagttagcgtttttgtttagtttagtattttttttcgtggggtatttttttttattttttattttgtaattttttattttattttaaagagtattttttgttaaaattttatgggtaaagttgttttagaatagtgttagggggtgtttttgtgtagtgagaattgattttatgattaaagggaaatattttttatttttattttcgcgattttttttttttttagtacgtggaaatcgaggattataatttattttagtttgcgttagatttgtgaagtaattttataatgatggggtgggggaaggaaagtatggtttagaagttttaatatttttttttttttagattttaagaggaagttttttttttgagaagttttaaagattatttattttaaattttaggaaaagagaagatttagttttttttttttttaatttttttatttttttttattttttatttttttggtatgggaagttttttttgatttttaagggaagttttttttttgttgtagttttatttagttttttgttttgttttgggtgaaaggtttgagttatttaaggtgggaaagtgatttgaagaggaggtttttttgtcggggagcgcggttgagtggggtcggggtggtgatggttgatagggtttttttttattttttttttagggggagtttttaagtttttgtcgttgcgacggtttagtgcgttgtacgtattagttttgttttattcgttggattagcgagaggggtttttggagttgtgagttttgttattttaagtattaggttttggcgattagtattaagaatttattgtaggtgaggtgtaaggagaggattcggagattgggcgaggattttttagttattggatttagggattttttaggaagtttattttatttattttttttttaaagttattttttttcgttagttattatagtttttcgtgtgtttgtatatttttttt

SEQ ID NO: 93 - DNA, 5976 bp, Artificial Sequence
  chemically treated genomic DNA (Homo sapiens)
agaggggtattttttattttaatttgaattttatgattgtattttttgttaggagatgaaagggataagattgtttgaaggattaatttttagtttttaggtaggttagtggttaaaatatttaggaagtgaaagtttgttttttgttataaggaaatttggagtttgtgattttattatgcggggtttgttatttgttaggtgatagggttttttatttatttgcggtgatttgaagggtaaggtttttggttaaatattttttttttttagtgatgtttgaaattttattgttagcgttggattttagtaagattttagagaaagtttaatttttggagtttgggttttttttagttgagatgttaggaaagtaatgggttttattatttgtacggataggtttgtgtatagttttaggggatttagggattttattagagtttatttatagatattaggttaaaagttttggatagtatttataatttttttgaaagaagaaaagtttttttttagagttttttttaaagtgtaaatggttttgggaggttcgaaatgatgagttggtcggtatgaaagaattttttttagtagatgtaagagataatttgaggagttttagtggcgggggtgggggaaggagagtttgggggaggggaggttttaggtagtttataattttttttagaattggaaagggaatgtattgggttaagagggttaattatttatttttgtagagtgtttataagaattttatgaattaagtgttattaatatttttattttatagatgaggaaattaagatggtggagataaaatgatttatgttttttaattaatggtagagttagaagtgaatttaggttggagtgaagtggttttagtgtttaaatgatttttttattttagtttttagagtagttgggattataggtatgtattgttatgtttagttaatttaaaataatatttgttggggagatggggttttattatgttgtttagattggttttaaatttttgggtttaagtaatttttttattttttaattagttttttaaagtgttgcgattatagttgtgagttattaggtttgtttaggtatttttgtttgatataagagaaaatagagggtaggtatagtggtttatatttgtaattttagtattttgggaggttgaggtaggtggattatttgaggttaggagtttgagattagtttggttaatatggcgaaatttcgtttttattaaaatataaaaattagttagatatggtgacgtgtgtttgtaattatagttatttaggaggttgaggtataagaattttttgaatttgggaggtagagagtgtagtgagtcgagatcgcgttattgtattttagtcggggtaatagagtaagattttgttattaaataaataaataggaaatagagaagtaatttagtgtgttgcgaaagttatatagtatttgttttttataaggagtttttttgtgttttcgttttattttggatatttgatttattgtttttggagtttggagaaggatttgtcgagaagtttgaagaatgtattaggtttgatttgattttgttgtttttaattgttttttaaaattttttttattgaattattagagtgtaatggaagagtcgatgagagtcgttgtagagttacgaggttaaggtttgttgggtagaagaaagtaaagttttaaaggtttttagggtttagcgatggtataaaatatgtatttttatataattgagaggaaaaaaataagtagatagtatagttttatgggggaaacgtttttttttgtatttttattattttgtttaaggtacgattttagtgggaaaggaaatatcggagttttttttttttgagttttttggtgggttaagagtagagggagttaaaatacgatatttaaaagatttgattggaaatttattaaaattgaggggataggttgttggggggggcggtgttgggttgtttagaaatcgtttgtatttgagaaattatttgatggatttagaggtatttttagttttgggtgaaatattttaaatatggttttttttaggaggaagcgaaataggggttgggttttttgaaagagtaatttttattttaaatatttattgagtagttgttatgatgagttaagaattttgtttagcgattgtttttgtattagtttatgttaatttatttatataaaggagaatattgatttttttaaggttatagggttagtgagtggttgattttatttaatgttgtgtagttttaattatgtttgaaggataaagggaaaggaggtgtttttgtcggggtagataagttatttagacgtggttggttatagggagttagatagggaagttgtttaatttaatatttgtttgtttattttgtttttgttttttgatggaggacggcgggtgttggagggttattggtttaggatttgagatttttggtttttatttattttatttttgattttaaaattattttattggggatagaattttttggagaaggtgatggtggttatggtgtggttgtggtattaaaagttttattttgggggttagaagattttgggttttggtttttggttttgatattgatttgtttatgtgatattgaataagttatttgtaaattataggtttgggtgaattttaaaggttttttttaggttaatattaaaaaatagattgaaaattgtagttttagttggaagattgggattatatgagatgaagttgattgttagaagaaaggttttggaattagagaggttggttttagttttgcgttattttttattggttttaatttttttaagttttagttgtttatttattatatgggaataataatatagtttttgggttgttttgaaatgagtttaaatgagttggttagtggttgggtacggtggtttatgtttgtaattttagtattttgggaggttgaggtaggtggattatttgaggataggagtttaagattagtttggttaatatgatgaaattttgtttttattaaaaatataaaaattagttagtcgtggtggcgtatgtttgtaattttagttatttaggaggttgatagaggagaatcgtttgaatttaagaggcgaaggttgtagtgagttaagaatatattattgtattttagtttgggcgatagagtaggatttcgttttaaaaaaaaaagagttggttagtgttaaatgtttagtatagagattggtatagtaatttttaatgtttagtatttattgttattattttttttttttttttttttttgagatagagttttgttttgtcgtttaggttggagtatagtggcgcgatttcggtttattgtaagttttattttttaggtttatgttatttttttgttttagtttttcgagtagttgggattataggcgtttattattacgtttggttaattttttgtatttttagtagagacggggttttattgcgttagttaggatggttttaattttttgatttcgtgatttgttcgtttcggttttttaaagtgttgggattataggcgtgagttattatgtttggttttattgttattatttttattttttatttttgtatagagtatttatggtttaagaaatatttgttattttaattgtatgggagttttataatagtatagggagatatttttgattattatttttattaggagggtggagaaattgaggttttgggaggtggttttgatttagggaattaatttgttgatttattaatttatgaagttttatagttaaaaaagattagattaaaaaatgagaatttagtaaaggggttgaggtaggaggatcgtttgagtttagaaatttgagattagtttcggtaatatagtgagattttttttttagaaaaattttttaaaaaattaggtcgttcgaggtagagtgtagtggtttacgtttgtaatttaatattttaggaggttgaagagggtggattatttgaggttaggagttttagattagtttggttaatatggtgaaatttcgtttgtattaaaaatataaaattagtcggtgtggtggtatacgtttgtagttttagttatttaataggttgagataggagagttttttgaattcggtaggcggaggttgtagtgagtcgagatcgtgttattgtattttagtttgggtaagatagagcgagatttcgttttaaaaaatataaataaaataaataaataaaaaattaggttgttagtttagtggtttatggtttatatttgaaattttagtattttgggaggttaaggtaggaggatcgttttagtttaggagttcgagattaggttgggtaatatagggagatatagcgtttttattgtttttgttcgtttcgatttgtttttttataaaaaggtaaaagaaaaaaaaattagtttggcgtggtggtgtgtatttgtatttttagttattagagaggttggggttagaggatcgtttgagtttaggagttcgaggttgtagtgagttgtgatcgtattattgtattttagtttgggtgaaagagtgagattttatttttaaaacgaataaataaaaaattttaaaaaataaaagaatttagttaagtgtaaaagttttttttgattttaggttttagtgagttatcggcggggttgggattcgaatttagtggaattagaatcgtgtaggttttataatttatttagattttagtaattttaggttagagggttatcgcgtttatgcgaggtcgggtgggcgggtcgttagtttcgttttggggaggggttcgcgttgttgattggttgtggtcggtaggtgaatttttagttaattagcggtacggggggcggtgttttcggggtttatttggttgtagttacgtatttttttttagtggcgtcggaattgtaaagtatttgtgagtttgcggaagttagtttagattttagttcgttttagttcggttcgattcgatcgtattcggcgtttgttttcgttcggcgttttcggttagttatgggtttttggagtcgtagtttttcggcgttgttgttgttgttgtaggtatttcggattttttgatttgcgagggacgtattcgggtcgtaagtttcgcgttttagttttgcgtttttttttttttcgtcgttatcgtttttttttttttaagaaagttcgggttttgaggagcggagcggtttggaagtttcgcgcgtttcggattttttagtgatgggagtggggggtgggtggtgaggggcgagcgcggtttttttgttttttttagcgtagatcgaggcgggggcgtttggtcgcggagttcgcggggtgggttcgcgcgggcggtgggggcgtgaagcggggtgtagggggtggggtgtggagaaggggtgttttggtgtaagtcgagggggagttaggagtcgtggggacgattttcgagggaaggagaggggtattcgtagaaataaaggtatttgttatgttaagaaaggtcgtaaataggagtgagggtttcggggataagaaagtgaggtcggaggaggtgggagcgtttttcgttttgaggagtggtgtattttcggtttaaggaaagtggggtattggagaataaagatatttttaataaaatgagaaaggagattgaaagggaacggtgggttaggttttgagggggtgattcggcggttttttttcgggagtttttgggggttcggcggtcgtaggtttcggggtgggggagggtgacgtcgttgttcgttcgtttcggggttgcgggttggggtttttttttaatttcgacgtcgggagcgagggaggggcggcgttgttggtttcggtgagtaggagggaatttttcgagttattcggttttatttattttttttttattttagg

SEQ ID NO: 94 - DNA, 5976 bp, Artificial Sequence
  chemically treated genomic DNA (Homo sapiens)
tttggggtgggggaaaggtagatggaatcgggtgattcggagggtttttttttgtttatcgaaattaatagcgtcgtttttttttcgttttcggcgtcgggattgggggaggattttagttcgtagtttcgggacgggcgggtagcgacgttatttttttttatttcgaaatttacggtcgtcgagtttttaggaattttcgggagggggtcgtcgagttatttttttaagatttagtttatcgtttttttttagtttttttttttattttattggagatgtttttattttttagtattttattttttttagatcgggaatgtattattttttagagcgaggggcgtttttatttttttcgattttatttttttattttcgggatttttatttttatttacgattttttttggtatggtaggtgtttttatttttacggatgtttttttttttttttcgaagatcgtttttacgatttttggttttttttcgatttgtattagggtattttttttttatattttattttttatatttcgttttacgtttttatcgttcgcgcgagtttatttcgcggatttcgcggttagacgttttcgtttcggtttgcgttggagggggtaggaaagtcgcgttcgttttttattatttattttttatttttattattggggggttcggagcgcgcgaggtttttaggtcgtttcgttttttaggattcgaatttttttggaagaagggaagcggtgacgacgggagaggaaggggcgtagggttggggcgcggagtttgcggttcgaatgcgtttttcgtaagttaggggattcggggtatttgtagtagtagtagtagcgtcgagaggttgcggttttaagggtttatggttggtcggggacgtcgagcgagggtaggcgtcgggtgcggtcgggtcgggtcgggttggagcgggttggagtttgaattgattttcgtaagtttataggtgttttgtagtttcgacgttattgagagggggtgcgtggttgtagttaggtgagtttcggaggtatcgtttttcgtatcgttgattggttgagggtttatttgtcggttatagttaattagtagcgcggatttttttttagggcggagttgacggttcgtttattcggtttcgtatagacgcggtgattttttagtttggagttgttagggtttaggtgggttatgggatttgtacggttttgattttattgggttcgaattttagtttcgtcggtggtttattaagatttgggattagaaagggtttttatatttggttgagtttttttgttttttgggattttttgtttgttcgttttggagatggggttttatttttttatttaagttggagtgtagtggtgcgattatagtttattgtagtttcgaatttttgggtttaagcggttttttggttttagtttttttagtagttgggagtataggtgtatattattacgttaggttaattttttttttttttgtttttttgtagagagataagtcggggcggataggggtagtgggggcgttgtgtttttttgtattgtttagtttggtttcgaatttttgggttgaagcgatttttttgttttggttttttaaagtgttaggattttaggtgtgagttatgagttattgagttagtagtttaattttttgtttgtttgttttgtttgtattttttgagacggagtttcgttttgttttgtttaggttggagtgtagtggtacgatttcggtttattgtaattttcgtttgtcgggtttaagagatttttttgttttagtttattgagtagttgggattataggcgtgtgttattatatcggttaattttgtatttttagtatagacggggttttattatgttggttaggttggtttggaatttttgattttaggtgatttattttttttagttttttgaagtgttggattataggcgtgagttattgtattttgtttcgagcggtttaattttttaaaaaatttttttagagaggggattttattatgttgtcgaggttgattttaaatttttgaatttaggcgatttttttgttttagtttttttattgagtttttattttttaatttagttttttttaattgtagagttttatgggttagtgagttagtaaattgattttttaggttaggattattttttaaagttttagtttttttatttttttaatgggaataatgattagaaatgtttttttatgttgttgtgggatttttatataattaaaatgataaatgttttttgagttataaatgttttgtatagaagtgaggggtaaaaatagtaataatagggttaggtatggtggtttacgtttgtaattttagtattttgggaggtcgaggcgggtagattacgaggttaggagattgagattattttggttaacgtagtgaaatttcgtttttattaaaaatataaaaaattagttaggcgtggtggtgggcgtttgtagttttagttattcgggaggttgaggtaggagaatggtatgaatttgggaggtggagtttgtagtgagtcgagatcgcgttattgtattttagtttgggcgatagagtaagattttgttttaaaaaaaaaaaaaaaaaaaaaatagtaataataggtgttggatattgaagattattgtgttagtttttgtgttaagtatttgatattgattagtttttttttttttgagacggagttttgttttgtcgtttaggttggagtgtaatggtgtgtttttggtttattgtaattttcgttttttgggtttaagcggtttttttttattagttttttgagtagttgggattataggtatgcgttattacgattggttaatttttgtatttttagtagagatagggttttattatgttggttaggttggttttgaatttttgtttttagatgatttatttgttttagttttttaaagtgttgggattataggtatgagttatcgtgtttagttattgattagtttatttaagtttattttaaaataatttaagagttgtattattatttttatatgatagatgggtaattgaagtttagagagattgaggttaatgagaggtggcgtaggattggaattaatttttttgattttagggttttttttttaataattagttttattttatgtggttttagttttttagttggagttgtagtttttagtttgttttttgatgttgatttggaagagatttttagagtttatttaaatttatgatttgtaaataatttgtttaatgttatataggtaggttaatgttaaagttaaagattaaaatttaggattttttgatttttagagtggggtttttaatgttatagttatattatggttattattattttttttagagaattttgtttttagtgaaataattttaggattaaaaatagaatagataggggttaaaggttttaggttttgggttagtggttttttagtattcgtcgttttttattaaaagataaaaatagaatagataggtaaatgttaggttagataatttttttgtttgattttttgtggttagttacgtttgggtggtttgtttatttcgataagggtattttttttttttttattttttaagtatggttagaattatatagtattaagtggagttagttatttattagttttgtgattttggggaagttagtgtttttttttgtataagtgaattggtatgagttaatataaaaataatcgttaagtagagtttttggtttattatagtaattgtttaataaatatttggagtaggggttatttttttaaaaggtttagtttttatttcgtttttttttggggaaagttatgtttggaatattttatttagagttaaaggtgtttttgagtttattaagtaattttttaaatgtagacgatttttgggtagtttagtatcgttttttttaataatttgtttttttaattttaatgagtttttaattaggttttttggatgtcgtattttggttttttttgtttttaatttattaggaggtttagagggagaaggtttcggtatttttttttttattaggatcgtgttttgaataagataatggaaatatagaaagaggcgttttttttatggggttgtattgtttgtttatttttttttttttagttatgtaaaaatatatattttatattatcgttgggttttgggagtttttagggttttatttttttttatttagtaagttttggtttcgtaattttgtagcgatttttatcgatttttttattatattttgataatttaataaaaaggattttagaaaataattaggggtagtaaagttaggttaggtttgatgtattttttagatttttcggtaagtttttttttaagttttaaagatagtagattaggtgtttagggtgaggcgggaatatagaggggttttttgtggaagataggtgttgtgtgattttcgtaatatattgaattgtttttttgttttttatttatttatttagtgataaggttttgttttgttgtttcggttggagtgtaatggcgcgatttcggtttattgtattttttgttttttaggtttaagagatttttgtgttttagttttttgagtagttgtgattatagatatacgttattatgtttggttaatttttgtattttagtagagacgggatttcgttatgttggttaggttggttttaaatttttgattttaagtgatttatttattttagttttttaaagtgttgggattataggtgtgagttattgtgtttgttttttgtttttttttgtattaaatagggatatttaagtaggtttggtggtttataattgtaatcgtagtattttgggaggttagttgggaggtgagaagattatttgagtttaggagtttgagattagtttgggtaatatggtgaaattttatttttttaataaatattattttgaattagttggatatggtagtgtatgtttgtagttttagttattttggaggttgaggtaggaggattatttgagtattggagttattttattttagtttggatttatttttggttttgttattagttgagaagtataagttattttatttttattattttggtttttttatttgtaaaatgggaatgttgatagtatttaatttataaggtttttgtaaatattttgtaaaggtgagtgattagtttttttggtttaatatattttttttttagttttaggaaaaattgtgagttgtttggagtttttttttttttaggtttttttttttttattttcgttattaaagttttttaggttattttttgtatttattggagaaaatttttttatgtcggttagtttattatttcgaattttttagggttatttgtattttaaagagggttttagagaaagatttttttttttttaaaggagttgtaaatgttgtttagggtttttaatttggtgtttgtggatgggttttggtggggtttttgaattttttgagattgtatataaatttgttcgtgtaggtgataaggtttattgtttttttaatattttaattggggaaaatttaaattttaggagttgagttttttttgagattttgttgagatttagcgttaatagtggaattttaggtattattggggaaaagaaatgtttggttagaggttttgttttttagattatcgtagatagataagagattttgttatttggtagataatagatttcgtatgatgggattatagattttaggtttttttatggtagaggatagatttttattttttgggtgttttggttattggtttgtttggaggttaaagattaattttttaggtagttttgttttttttattttttggtaaggggtgtagttatagggtttagattggggtgggaggtgttttttt

SEQ ID NO: 95 - DNA, 8666 bp, Artificial Sequence
  chemically treated genomic DNA (Homo sapiens)
ttgtagggttttttttagtttaaagaaagtaattaggtgtttttattgtgttatgatttttatttttagttgggttttttagtttggttttaaagaataaaataaaaggtttttttgtttgagttttatttaatttattttttttatttataagaggtattttaaatttttacgatttttaaattttttaatcgattattttatttttattttgtaaataagttaatttttttatttatagaaggaagtgttttaatttttttttcgttttgatttttttttttttttaaatttatgtattttttgtgataaaatttataattatcgttgtattttgagttttatttttttattatttttgagggattttaagtttttaaaaatattttattttgtttgtgtatttaattttttttttatttttttttaatttttttttttttttatttggtatttgtttttttaggtatatgtgtgtttaggttttttttattttttatttgttttattttatggtatagggttttgaattattataattaagttatgaaagagtagttaacgtagtgtttttatttttttgttattttattattttagttttttttttggttttttgaggagttttttataggttggtttttaggaataagtttaaatgaattatttttagtttttttaaatttttatgtttttgtatatttttttatttttgtttagaatattttttttttttttttttatttttaaatttttatattattttttaagattgggattagtttttagtattcggaagtttttgtttattagagataaatgagaatgagtttggttatttttttatttttttgtattattttgtgttttattttgtttttttaagagtattatatgttttatttaatttttaaataattgtttgaggtaagtatagttattattttaattatgtaaatgagaaaatagaggtttagatatgttgagtaattttgataaaagttaaagaattaataagtggaatagttgaggtttgaattttggtagtttgattgtagagatattatgtttgatttatttttttttgtttttattttatgtttgtttttagtttttgagtttgttgaatgaatgaataggtggtagtttttttttgttataagattgattagaattaagataggtttaaattttacgtgtagaatttttaaaattgtaaaggtagtgtaaatttaaaaaaagaatggtatttttaggaaagaggaaaagtaagtgtgagaataataataataataattaataaattttagtaaatttagtaaatgtagtaaatttttatattaaaagtttttggatatatattattatattttatggttatatgaaatatattataattttattttgtatataggaaatttgagattggtataaggagtatagagatttaggattttatatttttatttttttaggattttgtattttaggtcgatatgtatgagtaaattgggagtataatgggttttttaatagaaaaattaggaaagtttttttattattattaattatttatataatatttttttaattttattattatttatattttaagttttagagtatatgtgtataatgtgtaggtttgttatatatgtatatatgtgttatgttggtgtgttgtatttattaatttattatttagtattaggtatattttttaatgttatttttttttttttttttttatataagatttataatggataatggattttaatttttagagtaaaatggttttatttaaggatgttataatttttttagagttttattgtaagatatgagatatatatatttaaaatttgtttttggtatttttaaagtagttaatttttatatttgtttataatgtatttaaatgttgtttttatatggttgtattttttattttttttattaatagttatatatattttttataagagttgaaagagtttttgatgtaggaatttatggtagagttttagagaaatttttgaatttattgaaagttttatttagaaatatatgtgtaagtgaatatattttttttaaaaaaaattattatttatttttttttttgagaagaaggtatttattttaatagatttttgaaggagtttattttttttatttttttatttttattaagaattattgtaggtcgggtacgatggtttatgtttgtaattttagtattttgggaggttaaggtgggtggattatttgaggttaggagttcgagataagtttagttaatatagtgaaatttcgtttttattaataatataaaaattagttgggtatggtagtatgtgtttgtaattttagttattcgggaggttgaggtaggagaattgttcgaattcgggaggcggaggttgtagtgaatcgagagagatcgtgcggtgttattttattttagtttgggtaatagagcgaaattttattttaaaaaaatatataaaataaataaataaaaagaaagaattattgtattagtgatggaaatgtgtttttttttttttattttggtaattatttttttttttttttattataaaatattttaaattaaattaaaataattttatttatcgatagtttgaattttttttattattgttatatagttaattgagaggtatttcgaggaaaatataaatggtatagtaatgtattgtagattttaataatatatttgatattttaaattgtttttattggttttattttaaaaattatatgttttaaaattaagtagatattaaaagtataagatatattgggtttataaggtttaagttaattagggattgaaatataatttttaaatagagttggattatttagtaggtagattaagtatgtgtttaaggtattagtaaagtttgagtaatttattttttaaaacgtagtatatgtttttgataagtttaaaaagtagtagttataggaaaaattagaatttttatttttttgcgtttgttatattttttagtgttgtttaatttttttttgtaagtgagggtggtggagggtgtttataatttttttagggagtaagttttttttggttttttttttttttttttttttttttttttttgagattaagtttcgtttttgttttttaggttggagtgtaatggcgcgatttcggtttattgtaattttcgtttttttttgggtttaagcgatttttttatattagttttcgagtagttgggattataggtatgcgttattaagtttcgttaattttgtattttttagtagagatagggtttcgttatgttggttaggtttgtttcgaatttttggttttaggtgattcgtttgtttcggttttttagaatgttgggattatagacgtgagttatcgtattcggattttttttttatgtaatagtgataattttatttaaagtatttttttttttttttgagtcggagttttattttgttatttaggttggagggtggtggcgcgatttcggtttattgtaatttttgtttttcgggtttaagcgatttttttgttttagttttttgagtagttggaattatatacgtgcgttattatggttagttaatttttgtatttttagtagagacggggtgttattattttggttaagttggtttcgaatttttgattttaggtgatttgttcgtttcggttttttaaagtgttgggattataggtgtgagttatcgcgttttgttttaaagtattttttttttatgttttaaaataagattgtaagttagtttttaaagcggataatttaagagttaataggtattagtttaggatgtgtggtattgtttttaaggtttatatgtattaatatattatttaaatttataataatttttataaagtagggggtatttatatttttttttttttttataattacgaaaaatgtaaggtatttttagtaggaaagagaaatgtgagaagtgtgaaggagataggatagtatttgaagttggtttttggattattgtgtaattttgtttttagaatattgagtattttttttggtttaggaattatgattttgagaatggagttcgtttttttaatgattttttttttatttttttatttgtttataggtagaattttttttcgttcgtattaaataaattttatttttttagagtttgtttttatattaggtaatgtatacgtttgagaaatttttgttttagatagtcgttttatacgtaggaggggaaggggaggggaaggagagagtagttcgattttttaaaaggaattttttgaattagggtttttgatttagtgaatttcgcgtttttgaaaattaagggttgagggggtagggggatattttttagtcgtataggtgatttcgattttcggtggggtttttataattaggaaagaatagttttgtttttttttatgattaaaagaagaagttatattttttttatgatattaaatatttcgatttaatttggtagttaggaaggttgtatcgcggaggaaggaaacggggcgggggcggatttttttttaatagagtgaacgtatttaaatacgtttttgttggtaggcgggggagcgcggttgggagtagggaggtcggagggcggtgtggggggtaggtggggaggagtttagttttttttttttgttaacgttggttttggcgagggttgttttcggttggtgttttcgggggagatttaatttggggcgattttaggggtgttatattcgttaagtgttcggagttaatagtatttttttcgagtattcgtttacggcgtttttttgtttggaaagatatcgcggtttttttagaggatttgagggatagggtcggagggggttttttcgttagtatcggaggaagaaagaggaggggttggttggttattagagggtggggcggatcgcgtgcgttcggcggttgcggagagggggagagtaggtagcgggcggcggggagtagtatggagtcggcggcggggagtagtatggagttttcggttgattggttggttacggtcgcggttcggggtcgggtagaggaggtgcgggcgttgttggaggcgggggcgttgtttaacgtatcgaatagttacggtcggaggtcgatttaggtgggtagagggtttgtagcgggagtaggggatggcgggcgattttggaggacgaagtttgtaggggaattggaattaggtagcgtttcgatttttcggaaaaaggggaggttttttggggagtttttagaaggggtttgtaattatagatttttttttggcgacgttttgggggtttgggaagttaaggaagaggaatgaggagttacgcgcgtatagatttttcgaatgttgagaagatttgaaggggggaatatatttgtattagatggaagtatgttttttattagatataaaatttacgaacgtttgggataaaaagggagttttaaagaaatgtaagatgtgttgggattatttagtttttaatttatagatatttggatggagtttattttttttattaggagggattattagtggaaatttgtggtgtatgttggaataaatatcgaatataaattttgatcgaaattatttagaagcggtcgggcgcggtgttttacgttttgtaatttttttattttgggagattaaggcggggggaattatttgaggtcgggagttcgagattagtttggttaataggtgaaatttcgtttttattaaaaatataaaaagtagtcgggggtggtggtaggcgtttgtaattttagttattcgggaggttgaggtaggagaatcgtttgaattcgggaggttgaggttgtagtgaatagcgagatggagttattttattttagtttgggtgatagagtgagattttgtcgaaagaaagaaagagagaaagagagagagaaaaattatttagaagtaattatatattgtgtttatttttaattgagtagggtaaataaatatatgtttgttgtaggaatttaggaaataatgagttatatttatgtgattattttagaggtaatatgtagttattattttgggaatatttgttaatatttttgtttttttattatttttagtttatttgatatagtttatttgtgataagagtttttaattttttatttttgaatagaggtgttttttttttttttatttttgttttgtgagggagttaggggaggatttaaaagtaattaatatatgggtaatttagtatttttaaaattttgttaatagtttgaattcgggagtttggttttgtagttttataatattttagaagagattttatttgtttaaaaataaaaaggaaaaagaaaagtggatagttttgataatttttaatggagaagggagaagaatatgtagaaaaggggaaatgatgttggtttagaattttaattatattggtgtttaatataggaatatttatttatataatattttaaagtattaaatttatattagtatattattaaatggatatattattaaatgggtttaagtattttatatattttaatttaattgatttattttttttttgttttggatttttattatgatttaaatatttatatatgggttattttttagattttttatattatgaaatataagaaaaatttttaaggttagttttatgattaagacgaaggattttattgaatatataaaataataaatatattgtaatattttgtttttttttttgtagttgtaatttggtttgtttatattttttttttgtttttttgaaaattgagttagttttatttttttaggataggatttaataattataatataatttagtataattttttgatttaggtaaattatgtaatttgtgtttagtatgaaatgtatttaaaaataagtaatttttttttaatattattatttttaaattaatataataaataatagttattttaaaataaattgtttatttttattatgtagtatttaaattttaaggttgttatgattgtagatagtattttaaaatttttttttggaaatggttttgtttttaagatgatttaggaattaaagaggtgattattttttgtttaatgaatttttaaattataaatttgggaagtgttttagttttttattgttgttgttataaattattataaatgtgttagttaaaataaatataaaattattattttatagttttagagattagaagttaaaaatgggtttataaggttttattttttttggaaattttaaggggtaatttgtttttttgttttttttagtttttagtgattattaaattttttggtttatggtttttgtattttttttgtggtttgtgtttttatttttgtattttttttttgattgtgattttttaataaaaatatttggggttatgttgggtttattttgaaaattttggataattttttttaagattattaattaaattatatttgtaaagttttttttgttatataagttaatgtattaaaagtttttgaggattaggatatagatattgggggtgggggggtattatttagtttattataggaaggaattttagggttaattaaattagtttttttattttatatttgaagaaattgaagttttggaattggagagtattatgttaaatgaaataagttaaatatagaaagataaatattatatgtttttatttatttgtgaaatataaaataattatatttttagtagtaaagagtagaatggtggttattagagttggggggtgggaggaatggggagatggtaattaagatataaagttttagttaagatgggaggaataagtttgattgttttttttgagatgtgttttatagtatgatgaatatagttaaatagtaaattttaaatgtttttatttgataaaaatgttaaatatttgagatgatggataggttatttagtttgatttaataattttttattgtgtttaaagattataattttatattgtattatataaatatatataattgtattattttaatatataattttaaaattaatataatgaaaaagaaattgaagtttaatatttttagaagttaagtgtaatttaaaagttttgtgagaatttgttttaataaataaataagttttttttttttaataattattatattttgcgtttggatatatagtagtgaataaaaaaaaaaaaaaaaaaaaaaatttttaggtttaatataattttaggaagaaattttagtagttgtattttaggggaaatataggaagttagtttggagtaaaagttagtttgtttttgtttttttgttattttgttcgtgttttatagtgttttttgtttgtgacgatagtttcgtagaagttcggaggatataatggaatttattgtgtattgaagaatggatagagaatttaagaaggaaattggaaattggaagtaaatgtaggggtaattagatatttggggtttgtgtgggggtttgtttggcggtgagggggttttatataagtttttttttcgttatgtcggtttttattttggttttgattattttgttttttttggtagg

SEQ ID NO: 96 - DNA, 8666 bp, Artificial Sequence
  chemically treated genomic DNA (Homo sapiens)
tttgttagagagaatagaatggttagagttagggtgggggtcggtatgacggaaaggaagtttgtgtagagtttttttatcgttaagtagatttttatataagttttaggtgtttaattatttttatatttgtttttagtttttaattttttttttgagttttttatttattttttagtatataatgaattttattatatttttcgaatttttgcggagttgtcgttataggtagagagtattgtgaggtacgggtaaaatagtaaaggggtagggatagattgatttttattttaggttaattttttgtattttttttgagatataattattgaaatttttttttgaaattatgttaggtttggagatttttttttttttttttttttttgtttattgttgtatatttaagcgtagaatgtggtaattgttaaaaagagaaaatttgtttgtttgttaaaataaatttttataaaatttttaagttatatttagtttttgggaatgttgaattttaattttttttttattatattagttttaaaattatatattgggatagtatagttgtatatatttatgtggtataatatgaagttatgatttttgaatataatggggaattattaagttaagttaagtaatttatttattattttaaatatttgatatttttgttaaatgagagtatttgggatttattatttagttatatttattatgttatgaaatatattttaaaaaaaataattaaatttattttttttattttaattgaggttttatattttgattattatttttttattttttttattttttagttttagtaattattattttattttttattgttaagaatgtaattgttttatattttatagataagtgagaatatgtgatatttgtttttttgtgtttggtttattttatttagtataatgttttttaattttaaaattttaatttttttaagtataaaataagaaggttagtttaattaattttaaaatttttttttgtggtaggttgaataatgtttttttatttttaatgtttatgttttaatttttaaaaatttttaatatattaatttatgtggtaaaagaggttttgtagatgtgatttaattaatggttttgagggagattatttagaatttttagggtgggtttaatataattttaagtgtttttattagagggttatagttagagagaagatataagaatggaagtataggttatagagaaaatatagagattatgagttaaggaatttgatggttattagaagttggaaaagataaggaaatagattgttttttagagtttttaaaaggaatgaaattttgtggatttatttttgatttttgatttttagaattgtaaaataataattttgtgtttgttttagttaatatatttgtgataatttgtaatagtagtagtaggaaattaaaatattttttaggtttatgatttgagagtttattaaataagagatggttatttttttggtttttaaattattttggaaataaagttatttttagagaggaattttaaaatattgtttgtagttatagtaattttaaaatttgagtgttgtatggtggaagtagataatttattttaggataattgttatttgttatattagtttgaggatggtggtgttaaagaggagttatttatttttaggtatattttatattaaatataaattgtataatttgtttaaattaaggaattatattaaattatattatggttattaaattttgttttgagaaagtgaaattgatttagtttttaaagagataaagagaaagtataagtaaattaaattgtagttataaaaagaaagataaaatgttgtagtatatttattgttttgtgtatttaatgaagtttttcgttttggttataaaattagttttaaaggttttttttatattttatagtatgaaaaatttaaaaagtaatttatatgtaaatatttaaattatgatagaaatttaaagtaaaaagaaaatgaattaattgaattaaaatgtgtaggatgtttaaatttatttgataatatatttatttgataatatattaatatgaatttagtattttaaaatgttatataaataaatgtttttatattaaatattaatgtagttaggattttaagttaatattatttttttttttttatatgttttttttttttttttattaaaaattgttaaaattatttattttttttttttttttttgtttttaaataaataaggttttttttaagatattgtaggattataaagttaaattttcgggtttaagttgttggtaaaattttagagatgttaagttatttatgtattaattatttttaaatttttttttaatttttttataaaataggagtagggagaggagaaatatttttgtttaaaaatgaggaattgaaaatttttattataaataaattatattaagtaagttaaagatagtaaaagagtaaaaatgttagtagatatttttaaaatggtaattatatattatttttggaatgattatatgaatgtggtttattattttttaagtttttatagtaaatatatatttatttgttttatttagttaaaaataaatataatatgtagttgtttttgaataatttttttttttttttttttttttttttttttttcgataaagttttattttgttatttaggttggagtgaagtggttttatttcgttgtttattataattttagtttttcgggtttaagcgatttttttgttttaatttttcgagtagttgggattataggcgtttgttattattttcggttattttttgtatttttagtagaggcgaggttttatttgttggttaggttggtttcgaattttcgattttaggtgatttttttcgttttgattttttaaagtgaagggattataaggcgtgaggtatcgcgttcggtcgtttttgaataatttcgattaaaatttatattcgatatttattttaatatatattatagatttttattgataattttttttagtaagaaagataagttttatttaggtatttgtgaattggaggttaagtagttttagtatattttatatttttttaagattttttttttattttaaacgttcgtaaattttgtatttgataaagagtatatttttatttaatataaatatgtttttttttttagatttttttagtattcgagagatttgtacgcgcgtggttttttattttttttttttggttttttaagtttttagggcgtcgttaggaggaggtttgtgattataaattttttttgaaaattttttaggaagtttttttttttttcggagaatcgaagcgttatttgattttaatttttttgtaaatttcgttttttagagtcgttcgttattttttgttttcgttgtagattttttatttatttggatcggttttcgatcgtaattattcggtgcgttgggtagcgttttcgtttttagtagcgttcgtattttttttattcgatttcgggtcgcggtcgtggttagttagttagtcgaaggttttatgttgtttttcgtcgtcggttttatgttgtttttcgtcgttcgttgtttgtttttttttttttcgtagtcgtcgagcgtacgcggttcgttttattttttggtgattagttagtttttttttttttttttttcggtgttggcggaagagtttttttcgattttgttttttaaattttttggagggatcgcggtatttttttaggtaaggggacgtcgtgagcgagtgttcggaggaggtgttattaatttcgagtatttagcgaatgtggtatttttgaagtcgttttaggttgggtttttttcgggggtattagtcggaagtagttttcgttagagttagcgttggtaaggaaggaggattgggtttttttttatttgttttttatatcgtttttcggtttttttgtttttagtcgcgttttttcgtttgttagtaaaggcgtgtttgagtgcgtttattttgttaaaaagaaattcgttttcgtttcgtttttttttttcgcgatataatttttttaattgttaaattgaatcggggtgtttggtgttatagggaaagtatggtttttttttttaattataagaaaaagtaaaattatttttttttagttgtgagagttttatcgagaatcgaaattatttgtacgattagaaagtgtttttttatttttttaatttttgatttttaggagcgcggggtttattaagttagaaattttagtttaaaggattttttttggagagtcggattgtttttttttttttttttttttttttttttgcgtgtaaaacggttgtttggggtaagggttttttagacgtgtatattgtttggtataagagtagattttgaaaagatgaggtttatttaatacggacgggggagaattttgtttgtaggtagataggaaaatggggagggagttattggaaggacggattttatttttaaagttataatttttagattagaaaaagtgtttagtgttttagaagtagagttgtatagtgatttaaagattagttttaaatattgttttgttttttttatattttttatattttttttttttattgaaaatattttgtatttttcgtaattataaagggggaagggaatatgagtgttttttgttttataggggttgttgtgagtttaaatgatgtattaatatatataagttttaagaatagtgttatatattttaagttaatatttgttagtttttgaattattcgttttgaggattggtttgtaattttgttttgaggtatagaaagaaaatgttttggagtaggacgcggtggtttatatttgtaattttagtattttgggaagtcgaggcgggtagattatttgaggttaggagttcgaggttagtttggttaaaatggtgatatttcgtttttattaaaaatataaaaattagttggttatggtggcgtacgtgtgtaattttagttatttaggaggttgaggtaggagaatcgtttgaattcgggaggtagaggttgtagtaagtcgagatcgcgttattattttttagtttgggtgatagaatgagatttcgatttaaaaaaaaaaaaaaatgttttggatagaattattattattatataaaaggaaagttcggatgcggtggtttacgtttataattttagtattttgggaggtcgagataggcggattatttgaggttaggagttcgagataagtttgattaatatggcgaaattttgtttttattaaaaaatataaaattagcggggtttggtggcgtatgtttgtaattttagttattcggaggttgatgtaggagaatcgtttgaatttaggagaaggcggaggttgtagtgagtcgagatcgcgttattgtattttagtttgggagataagagcgaaatttggttttaagaaaaaaagaaagaaagaaagaaagaaagattaagaagaatttattttttgaaaagattatgggtattttttattatttttatttataaagaaaagttaaatagtattaaagagtataataagcgtaaggaggtaaaagttttaattttttttgtgattattattttttaagtttattaaaaatatgtattacgttttaaaaaatggattgtttagattttgttgatgttttaagtatatgtttaatttgtttattggataatttagttttgtttaaaagttatattttaatttttggttgatttaaattttgtagatttagtatattttgtatttttagtgtttgtttgattttaaaatatgtagtttttaaaatgaagttaatgaaaataatttgggatgttaagtatgttattaaaatttataatgtattattgtattatttatatttttttcggggtattttttaattagttgtgtagtaatgatagggaaaatttaaattatcgataaataaaattattttagtttagtttaagatattttatgatggaggaggaagaaagtggttgttaggatgggagggagggaatatatttttattattaatataatggttttttttttttgtttgtttgttttgtgtgtttttttgagatggagtttcgttttgttgtttaggttggagtgaaatggtatcgtacgatttttttcggtttattgtaattttcgtttttcgggttcgagtaatttttttgttttagtttttcgagtagttgggattataggtatatgttgttatatttagttaatttttgtattattagtagagacggggttttattatgttggttaggtttgtttcgaatttttgattttaggtgatttatttattttagttttttaaagtgttgggattataggtatgagttatcgtgttcggtttatagtggtttttaatgggggtgggagagtgggaagagtaggtttttttaagagtttgttgaaataaatattttttttttaaaaaagaaagtaggtaatgattttttttaaaaaagatgtgtttatttgtatatgtatttttagataaaatttttagtgaatttagggatttttttgaaattttattatggatttttatattaagaatttttttagtttttgtgaaaaatatatatagttattggtgaagaagatgggagatgtaattatataaaaataatatttggatgtattataaataggtgtaaaagttgattgttttggaaatattaagaataagttttagatatgtatattttatattttgtagtagagttttggaaggattatggtatttttgggtggggttattttgttttagaaattgaagtttattatttattataaattttatgtaggggggaggggggagggatagtattaggagatatatttaatgttaaatgatgagttgatgggtgtagtatattaatatggtatatgtatatatatgtaataaatttgtatattgtgtatatgtattttaaaatttaaagtataaataataataaaattaaaaaaatattatgtaaataattaataatagtgggaaaatttttttagtttttttgttaaagagtttattatatttttagtttatttatatatatcgatttgaggtgtaaaattttagaagaatgaaaatataaagttttggatttttgtgttttttatgttagttttagattttttatgtgtaaaatgggattataatatattttatgtggttataaaatatgataatgtatgtttaaaagtttttaatgtaaaaatttattatatttattaaatttattaaagtttgttggttattgttattattatttttatatttatttttttttttttttgagaatgttattttttttttagatttgtattgtttttgtagttttgaaaattttatacgtgaaatttaaatttgttttaattttgattagttttataataaaaaaagattattatttgtttatttatttaataagtttagaaattaagggtagatatggggtgggggtagaggggagtaggttaaatatagtatttttatagttagattgttagggtttaaattttaattgttttatttattggttttttaatttttattaaagttatttaatatgtttgggtttttgtttttttatttgtatgattaggataataattgtatttgttttaaatagttgtttagggattaaatgaagtatgtaatgtttttagaagagtaaaataaagtatagaatgatataagaaaatgaaaaggtgattaaatttatttttatttgtttttagtaggtaaaggttttcggatgttgagagttgattttagttttgaagaatgatgtgagagtttaaagatggaaaagaaggagaaagatattttaggtagaggtaagaggatgtgtaaaggtatagaagtttaggaaaattgaaagtaatttatttagatttatttttgaaaattagtttgtgaaggattttttagagagttaaaagaaaaattaggataatgggatggtaaggaagtggggatattgcgttgattatttttttatagtttggttgtgatagtttaaggttttatgttatgaagtgaggtagatggaaggtggaggagatttgagtatatatatatttggaagggtaagtgttaagtgaagagaagggaaagttagaaaagaataaaagaaaagttaagtatataggtaagataggatatttttgaggatttgaggttttttaaaaataatgaagaaatagaatttaaagtatagcggtggttatagattttgttataagagatatatagatttgggagggagaaaaggttagaacggggaggaagttgaggtatttttttttatgaatgaggaggttagtttgtttgtagagtgaaaataagatggtcggttaggaagtttgagaatcgtaaaggtttggaatattttttatgagtagagaggatgggttgagtaagatttagatagagaagttttttgttttgttttttaaaattagattggagaatttagttgagggtggagattatgatatagtagggatatttgattattttttttaaattaaagaaagttttgtag

SEQ ID NO: 97 - DNA, 7309 bp, Artificial Sequence
  chemically treated genomic DNA (Homo sapiens)
atgcgattaatggtgttaattgttttttggattgtttttatagtataggataagattatattagttttagtaggttttattgaagaaagtttatgtgttttgtagaaataagatttttagtttagtttaataggagattaattatatgtttattttatttttttttaaggtatgatagtatttggttgagatgtttgtgtgtattttttgtgtgaagttgagtatgtaatttttaaagaaattataaaggagttattcgtttttaaaggaaaaatatatgaattttacgggtataaggaagatattaaaatagggttggggagaagtttttttttttttattttatagtattttttatagaaataattgattgtttgaatatatggttattgaaatatatatatatatatatatatgtatatgaaaataagagttggaatatttgattttgttttttattttttattattttagataatataggatataatatggttttattgtatatatgtgttttttggtttaaaaatattgagagtagatttttgtggaaagaaatatgaaaatttgaggatttatgcgaatgtagttagaggcgaatgtagttagaggggtttttaatttgttggtagagttgggggagagttggggtaattttattgttatgaaattggttttagatggaggtaaggaaaggtgtttattttttgttggtgttagatatagagagattttgtagtatttcgtattttaggtttagaattgtttagtgttgggtagtagttttattgagggtttggttagagtttatggggatgggtggattaggttgtttgttgtttggaaaaggttattttgaatataatgatttttatatggacggtggggtttgggggaaggtatcgtggttagggtttggaggggaagagggaggaaagtaaagaggagtttttttatgaggtaatagaaatgatagtattttttttaggttgaatttttaaaatttagttttgttttggaagattgggattgtggtattttttgtagtgtttttagatcgttttaaggtttttaaattaatgatttataattatgttgtttttttagagagtatttttttttttggttgatatgtggttagtttaggggtggaggagtttcggtagttacgaatttagacgggatgttgattgagagttttgtggttatggtagatgggaggggtgagttttatttatttaaaggtattcgtattttatcgatgagtgtggaattgtgttttttcgttttcgtagtgagacgatcgattaggattgtaggttgagtaaatgggtgttttttggtttatagcgttttttagtattagttagcgggatagagtttcgtgaattttttaaggagttattatttgtttgtttgaatgttggaaaggggtcggtggtgttgattattggatttatttaattaatatttattaaattcgttgttattaatatttaatttttgtgttttaggggtttagattttagtaagggaaatagatgggtaaataattatattagagttagttaagtattgttaaagaagttgatatagggtgttgtggggatatatgggaggggaattagaggaggtttttcggaggaggtgatatttaagttgaggtttgaaggatgtggaagagtttagtaatttttgaagattaaaaaaatggtgataaaaaagatatttttttaattttttagtgttacgatttaagagataaataagtaggtgaacgtataattatattgggttttattataagttagagtttgttttttttaggattttggtattataattttttttgaaattttgttttcggtattgatttttgggggaggtagtaatataggaatttagtgttcgttgcgaaattgatggatggtttttagttttgggtacgtttttatgtgttaaatttgtttaaatggtaggatttattttttttttagaagtatttatttgttttataggattttttatggaattttggagtttttgaggcgagagggattttggatattattgagttttattttttatttaataaatatagaagtggacgtttggataggtaaagtgatttgattaaggtaggtgtatagttattttgtaatattgggaataaattttaggttttttgattttttgtttttattttattttttttttattttttagaaataaagtttttatgtgtttttttttatagtgatatgtttggaatgtattagttagtaatttaggaagggaaaaaaataaatatataagagataaatttgttaggaggataaatttgtattgtttttgattggtttagagggtgattattattatggtagagaattatttaattagtgtaagtaaaatttttttgtgggttgggtattgtataaagatttaaacgaatttgtttatagatttgaaaagtagatacgagatttgtgaatggttggggtttttaagtttatagtataagtatgggttatattttatagtttggaggattgagttttgaaaatgggtaagtttttttatttttttgaattttattttttttatatttaaaataaggatgagtagtttttgaggttttttttacgatttttttttttatagattttagtattttataatttgatataaagagggtggatatgaatttattttttttagaaaagttttaggaaagagaatattaggttattttagtaggtgtgtagataggttagatagattttgaaatttatttagttttttttagatgtataattttattattgtttttagttgttaagagaaagtaggagagtttgtatttttattttttttttttttttttttttttttggagacggagttttattttattatttaggttagagtgtagtggtatgattttagtttattgtaagtttcgttttttaggtttacgttatttttttgttttagttttttaagtaattgggattataggcgtttattattatatttggttaattttttgtgttgttagtatagacggggttttattatgttagttaggatggtttcgattttttgatttcgtgattcgtttattttggttttttaaagtgttgggattataggcgtgagttatcgtatttagtttgtatttttatttttattgttagttttaggtttattttatttagtttattaagtgatgttgaataattaatttttatatattattaggtttatggatattatgatatttagattgatgggtgtttgttgaagggggtgattttagtaggaggatttttttacgtaaggatttatggagtttgttgttttttttttttagggtgagaattaaattgtttttatacggtgggtagaggggaattgatttaggtttggaataagagagaatattttaattgaaaagtttttggaattcgttgaattttaagatattgtgtggattagtttaggatagggagtgagaagaaattaattaaaaggtaatttcgttattttttagttggaaaaaagattagattatatttgtgtttttataattaagtagttgttggaaaaaaacgttttagatgttttttatgagaaaattgttgtttgaagtttagtagaagttatttatttgatatttatattttaggtaaggtttttcgttggagaaaatatcggtattttggataaaattgaaatgtgaaaagaaagggaagagagggtttttattatgtaagatgtttatttaaagtggatttggtttggaaagttttttaaaattttttatatgattgtggaataagttatgtggggcgcggggataagcgaattttttaaattttattacgtatgtttttatttaatttggatttttagagtggtttttagggtattttgtttaggatttagttagttgttggttatatttatgttttttagttttttgagattttatttggttttgagagggttaaaaagtagtgtggttaaatattttaggttttaaagtatttttattgtggttggggaagtaatagaattatattttataaaataatgaaaatagtgttagaaaaatatcgagagatagaaatatttttacgagttaggttatagttagagtgaaggtagggaaggtttttaaagttgggtggaggggataagttaaaaagatgtggaaattggttttttttttttatggttaaagtgtttaaaggggaaaaaggagttttaaaaatgtttttggaaatattattttttacgaatttttcggtttttgttgttttaatgttatttgtttgagatgtaaatagaggagttttgagaaagaagttgaatttgtatttttttttgtttttatttgttttaaatttgtggtatttttaataggatgaagcggaagagaaagggaaagagataaaagtgtagaaagatggaagattttagttgtaaatggttatttgtagttagatggaatagttgttgacgtttagggaaatgtatgtttttttttagatgggaaggagtagtggaaaggggtgacgagtttttggttggttattaattattttatttttttgtgtcggttttttatttggaaagtgggagtgatatttgtgtttgttttttttatttataaagattattgtgagagttataatacggtgagatatagaattttgtttttaaaaatataaagtagaattaagatgttaataataaggatagtaattgtgttagttatttgtaattatttattatagttagtcgtttaggattttggatcgtttttttggttttattatagttttggattagtttatttttaaattttttgttgaagggtggagttttgttagttatgggtagggaattatttttttttgtttttttattttttgttttttaaatatgtttagggtttttgtatttgttgttttttttgtttggtattttttttttgtggtttgttttagagttgatttttgtttttgtttattttttagcgaggatggtattttagggagttttttttttattatcgtagagagagtaggttttttttagttatgtttaatttagaattttgttttgttttttttatagttttagtattatagaaaattattttgtgtatttatggatgtttacgggggtaagggttttgtgttgtttaatttagtattttgaatcgtgtttgttgaatgaatatagaatttcgtttgttttgggagagtatagaaaatagttttttattatatattatagttagttgtaaatagtagatggttttttatattttagagagtaagaattagagagagagagaaagagagagagtttgggttttttttttttgtgtttgttttttttagagaaattggaggggtagtagttagtattttttcgttggttttattaagtatagttaaggtttttaggatatggttattttttatttgtggaagcggttttgttggggtgggtgggtgttagttggttttggtttgggttagagatatttagtggtttaggtgggcgtggggttagggcgtagacgagaaggggtacgagggtttcgtttcgaggatttagcggtaagtatcggtttcgggcgcgttttagtttatttattcgcgtgtttacggcggtattattttttataaggatttgaacgattcgggggcggtttcgtttcgttattttttgttttcggtttcgttttttttttggagggtcgatgaggtaatgcggttttgttattggtttgagggggcgggttttaatagttcgaggcggggttttcgggggtttagcgttatattattcggtcgtttaggtagcggcgtagagcgggtagtaggtaggcggcgggcgtttagacggtttttttttttttttttgtttttttagtttttgttttttcgtcgggaggtcgttcgtcgagttttgcgttagcgtcgaggtagtttcgttgcgttttatttcgtttcgtcgggtattcggagggtagcgcgtcggaggttaaggttgtttcgtacggttcggcgggcgagcgagttcgggttgtagtagtttcgtcggcggcgcgtacggtaattttggagaggcgagtagtagtttcggtagcggcggtagtagcggtaatgattttttggttcgggtttatcgtgtttttgggtagttggagtttgggggattggggcgtcgaggcgtgtatatgttcgtttagttatttttaggacgttttttgtaatttcgatatcggtaagcgtttttggtgtttcgttcgagttttacgttgtagttaggattgtagcgttgtttagggaggtagggcgagttttattttttttttttgttttaggagaggggtagacggggttggggcggagtggagaaattcgatgtttttgggcgggggcgttggtatagttgagaggggaagatgttttgtagaggaaatttatagtggttgagggagtttttggtcgtttttgtttttttaatttaggtcgtgaggtttttatcggtttttttgatatttggaaaatgtttttatttattattaacggaggaagggttagaagagaagggtggggaaagggtttttaaaatttggaatgttaattaaagtgttgggaaattgaatagttaaaaaaaaaaaaaaaagttgttcgttatgtgtacggaaagttgtaggagaaatttggagtatttcgagtttgtattattttttgcgtttatgaaatttattttttttattgagatttaatttagttgtaggttttttaggtaagcgttaatcgagtttttgggattgttaagtttgggtggatttaagggggaaaatgaggagaaagttgtggtattgatttacgttttggaggtattgtgtttgagagtgttgatagttagtagaaggtgcgaggggttatttattatatagttgtgaaaatttataggaaggttattttttttttttttgaatgtgtgtggggagggggagaatgggtagtggaaaatagatttgttattaaaagaataaatttgttaagggttatattacggtgatagttttagattggatttagtgttttgagtagagagattttgtaaagagattttttattttttagtgtgtatggagggtttcgagagtattttgggaggtttgtttgggagtgtttgggatatttgtgtttggatggttaaaggtggagtggtatttgggaaatatttttttttttttttttagtttataaag

SEQ ID NO: 98 - DNA, 7309 bp, Artificial Sequence
  chemically treated genomic DNA (Homo sapiens)
ttttatgggttggaaaggaggagagagatgttttttagatgttattttatttttagttatttaaatataagtgttttaaatatttttagataagttttttaggatgttttcggggttttttatatatattaaggagtaggaggtttttttatagggtttttttatttaagatattaagtttagtttggaattgttatcgtgatgtgatttttggtaggtttgtttttttggtgataaatttgttttttattatttattttttttttttttatatatatttaagggggaaaaaaatagtttttttgtgaatttttatagttatgtggtgagtgatttttcgtattttttgttggttattaatatttttaaatatagtgtttttagggcgtgggttaatgttatagttttttttttatttttttttttaaatttatttaaatttggtagttttagaagttcggttagcgtttgtttgggaagtttgtagttgggttgggttttagtgaaaagaatgaattttataggcgtaggagatgatgtagattcggagtattttaagttttttttgtaatttttcgtgtatatggcgggtaatttttttttttttttttaattatttaattttttagtattttagttagtattttaagttttgggaattttttttttattttttttttttagtttttttttcgttagtagtgaatggggatattttttagatgttaaaaggatcggtaggaattttacgatttaagttaggaaagtaaaggcggttaggggtttttttagttattgtgagttttttttgtagggtattttttttttttagttatgttagcgttttcgtttaaggatatcgagtttttttatttcgttttaatttcgtttgttttttttttggggtagaggaaaggagtggggttcgttttgtttttttaagtagcgttgtagttttggttgtagcgtggggttcgggcggggtattaggagcgtttatcgatgtcggagttgtagaaggcgttttgggggtggttgggcgagtatgtgtacgtttcggcgttttagttttttaggttttagttgtttaggagtacgatgagttcgagttaaggggttattgtcgttgttgtcgtcgttgtcggggttgttgttcgtttttttaaagttgtcgtgcgcgtcgtcggcggggttgttgtagttcgagttcgttcgttcgtcgggtcgtgcggggtaattttggttttcggcgcgttgtttttcgagtgttcggcgggacgggatggggcgtagcgaggttgtttcggcgttggcgtaggattcggcgggcggtttttcggcgaaggagtaggagttggaggagtaagaggaggaggagaagtcgtttgagcgttcgtcgtttgtttgttgttcgttttgcgtcgttgtttgggcggtcgagtgatatagcgttgggttttcggggatttcgtttcgggttgttggggttcgtttttttagattaatggtagagtcgtattattttatcggttttttaaaaagggggcggggtcgggggtaaggggtaacggggcggggtcgttttcggatcgtttagatttttatagggaataatgtcgtcgtgggtacgcgagtgggtgggttggggcgcgttcgggatcggtgtttgtcgttgggttttcggagcggagttttcgtgttttttttcgtttgcgttttggttttacgtttatttgggttattgggtgtttttgatttaaattagaattaattaatatttatttattttagtaggatcgtttttataggtgaggggtggttatgttttagagattttgattgtgtttggtggaattagcgggggaatgttaattgttatttttttagtttttttggagagagtaggtatagaggagaaagatttaaattttttttttttttttttttttttggtttttattttttgggatatgggaagttatttgttgtttgtagttggttatgatatatgatagaagattgttttttgtgtttttttagagtaaacggggttttgtatttatttaataaatacggtttaggatgttgggttaagtaatataaagtttttgttttcgtggatatttatgaatgtatagggtgattttttgtgatgttagggttatgaagaaaataaaatagagttttgggttggatatgattggggagggtttgttttttttgcgatagtaagggaagggttttttgaagtgttattttcgttgagaagtggataaagataaggattagttttggggtaagttataggagagaggtattaggtagggggaatagtaagtgtaaagattttgggtatgtttgaaagatagaaagtagaaaggtaagaggaagtggttttttgtttatggttgatagagttttattttttagtaagggatttgggggtgagttgatttaaaattgtagtaaaattaggagaacgatttaggattttagacgattagttataatagatgattgtagataattaatataattattatttttattattgatattttgattttgttttgtatttttaaaagtaggattttgtattttatcgtattatagtttttataataatttttgtgggtaggaaaagtaagtataagtattatttttattttttagatgaggaatcggtatagaaagatgggatgattggtggttagttaggaattcgttatttttttttattgtttttttttatttgaagagagatatgtatttttttgaacgttagtagttgttttatttaattgtaaatggttatttgtagttgggattttttatttttttatatttttgtttttttttttttttttttcgttttattttgttagaaatgttataagtttggaataaatagaaatagggagaaatgtaagtttagttttttttttagaatttttttgtttatattttagataagtgatattgggatagtagaggtcgaagaattcgtgagagatggtatttttaagaatatttttgaaattttttttttttttttgagtattttagttataggaaagggaaattagtttttatatttttttgatttgttttttttatttagttttaaaaattttttttgtttttattttaattgtggtttaattcgtagagatgtttttgtttttcgatgtttttttagtattgtttttattgttttatggggtatgattttattgtttttttaattatagtaggaatattttgaggtttgggatatttagttatattgttttttagtttttttagaattaaatagggttttaggagattggagagtatgggtgtggttaatagttgattgagttttgagtagagtgttttggaggttattttaaggatttaggttgaatgagggtatacgtggtggaatttgagagattcgtttattttcgcgttttatatgatttattttatagttatgtggaaggttttagaagattttttagattaaatttattttggataagtattttatatgatagaggtttttttttttttttttttttatattttagttttgtttaaagtgtcgatattttttttaacggaaggttttgtttggaatataagtattaagtagataatttttgttgaattttaagtagtagtttttttatagaaagtatttgaagcgtttttttttagtagttatttaattatgaaagtataagtataatttgattttttttttagttgaaaagtaacgaaattattttttggttaatttttttttattttttattttaagttggtttatatagtgttttgaagtttagcgaattttaagagttttttagttgggatgtttttttttattttaaatttgagttagtttttttttgtttatcgtgtgaaggtagtttggtttttattttaaggaaaagaaatagtaaattttatgaatttttgcgtaggggagtttttttgttagggttattttttttagtaggtatttattagtttggatgttatggtgtttatgagtttaataatatgtaagaattggttatttaatattatttaataagttaggtggggtgaatttgaggttaatagtaagaatgaagatgtaggttgggtgcggtggtttacgtttgtaattttagtattttgagaggttaaggtgggcggattacgaggttaggagatcgagattattttggttaatatggtgaaatttcgtttgtattaataatataaaaaattagttaggtgtggtggtgggcgtttgtagttttagttatttgggaggttgaggtaggagaatggcgtgaatttgggaggcggagtttgtagtgagttgagattatgttattgtattttagtttaggtgatggagtgagatttcgtttttaaaaaaaaaaaaaaaaaaaaaaagaatgaagatgtaggtttttttgtttttttttgatagttaagaataatgatagagttatatatttgggaagaattgagtaagttttaagatttatttggtttgtttatatatttattaggatgatttggtatttttttttttggaatttttttaggaaaggtgagtttatatttattttttttgtattaagttataggatgttagagtttgtaggaagagaagtcgtaaaaaggattttagaaattatttatttttgttttaaatgtgggaaaaataaggtttagagaagtgaaggaatttgtttatttttagggtttagttttttaagttgtaaggtgtggtttatgtttgtattgtgggtttggaaattttagttatttatagatttcgtatttgttttttagatttgtagatagattcgtttgagtttttgtatagtgtttagtttatagagaaattttatttatattgattaaataattttttattatgataataattattttttgagttaattagaagtaatataggtttgtttttttgataggtttattttttgtgtgtttatttttttttttttttaaattattagttaatgtattttaaatatattattataaaaaaaagtatatgaaaattttgtttttgggaaatgaaaagagagtaaagtggaaataaaaaattaaaagatttgagatttgtttttaatgttgtagaatagttgtgtatttgttttggttaagttattttgtttgtttaggcgtttatttttgtgtttattggatgaaagatagaatttagtggtatttaggatttttttcgttttaaaaattttaagattttatggggaattttgtaggataagtgaatgtttttgaaggggagatgggttttgttatttaaataggtttgatatatgggaacgtatttaagattgaagattatttattagtttcgtaacgaatattgagtttttatattgttattttttttaagaattaatgtcgaaaatagaattttagagaagattgtgatgttaaagttttaggagagataggttttggtttatggtggagtttagtgtagttatgcgtttatttgtttgtttgttttttggatcgtagtattaaaaagttaggaaggtgttttttttattattatttttttggtttttaggagttattgaatttttttatattttttagattttagtttagatgttatttttttcgggaaattttttttgattttttttttatgtatttttataatattttgtattaatttttttgataatatttagttgattttaatgtgattatttatttatttgttttttttgttggagtttaagtttttagaatatagggattaagtgttggtaataacgagtttaataagtattggttgaatgggtttaatgattagtattatcgatttttttttagtatttagataggtaggtggtggttttttggagagtttacggagttttatttcgttggttggtgttagggggcgttataagttagagaatatttatttgtttagtttgtagttttggtcggtcgttttattgcgagggcgggagagtataattttatatttatcggtggggtgcgggtgtttttgagtgggtgaagtttattttttttatttgttatggttataaagtttttagttaatatttcgtttgggttcgtggttgtcggagtttttttatttttgagttggttatatgttaattaaagggggagatgttttttggggaagtaatatagttgtgaattattggtttgggggttttagggcggtttgggaatattgtagaggatgttatagttttagttttttagggtagagttgggttttggaaatttaatttggagaaggtattgttatttttgttgttttatagggaagtttttttttgtttttttttttttttttttttagattttagttacgatgtttttttttaagttttatcgtttatgtgaaagttattatatttaaaatggttttttttaagtaatagatagtttggtttatttatttttatgagttttggttagatttttagtggggttgttgtttagtattgggtaattttgagtttaagatgcgaggtattgtaggatttttttgtgtttggtattagtagggggtaaatatttttttttgtttttatttggagttaattttatggtagtaaaattgttttagtttttttttagttttgttagtaaattgaagatttttttggttatattcgtttttggttatattcgtatgaatttttaggtttttatatttttttttatagggatttatttttagtgtttttaagttagaaaatatatgtgtgtagtaaagttatgttgtattttgtgttatttagggtggtgggaaatggaaagtagagttaaatattttagtttttgtttttatgtgtatgtatgtgtgtgtatgtatgttttaatgattatatatttaagtagttaattatttttgtgaagggtattatgaaatggaaggagaagaatttttttttaattttgttttaatgttttttttatgttcgtggagtttatgtgttttttttttaaaaacgagtagtttttttgtggtttttttgaaggttgtatgtttagttttatatagagaatatatataagtattttagttaggtgttgttatgttttgggagggaatgggatggatatgtggttggttttttgttagattgggttggaggttttgtttttgtaaggtatatgagttttttttagtggaatttgttggaattgatatggttttgttttgtgttgtggggatagtttaaagagtagttaatattattgatcgtat

SEQ ID NO: 99 - DNA, 3715 bp, Artificial Sequence
  chemically treated genomic DNA (Homo sapiens)
gaatttcggcggagagaattttttgtttttttttattttttttttatttttttttgttttttttatttcgagtgcggagtagagattaaaagatgaaaaggtagttaggtttttagtagttaaaaaataaaataaataaaaataaaaaagtcgaaataaaagaaaaagataataatttagtttttatttgtatttattttagtggatattgaatttggaaggtggaggattttgttttttttttttaagatttgggtattttttgaatttattttttaagtattaagagatagattgtgagtttagtagggtagattttgtttatcgtgtgtttttttttgtacgagattttgaggttgttagagcgttttttgcgtggttgttttcgtaagtttttttttttggagtttttcgtaggtgggtagttagttgtagcgattatcgtattattatagtttgttgaatttttttgagtaagagaaggggaggcggggtaagggaagtaggtggaagatttagttaagtttaaggatggaagtgtagttagggttgggaagggtttattttcggtcgtcgtttaagatttatcgaggagttttttagaatttgttttagagcgtgcgcgaagtgatttagaattcgggttttaggtatttagaggtcgcgagcgtagtatttttcggcgttagtttgttgttgttgtagtagtagtagtagtagtagtagtagtagtagtagtagtagtagtagtaagagattagttttaggtagtagtagtagtagtagggtgaggatggttttttttaagtttatcgtagaggttttataggttatttggttttggatgaggaatagtaatttttatagtcgtagtcggttttggagtgttatttcgagagaggttgcgttttagagtttggagtcgtcgtggtcgttagtaaggggttgtcgtagtagttgttagtattttcggacgaggatgatttagttgttttatttacgttgtttttgttgggttttatttttttcggtttaagtagttgtttcgttgattttaaagatattttgagcgaggttagtattatgtaatttttttagtaatagtagtaggaagtagtattcgaaggtagtagtagcgggagagcgagggaggtttcgggggtttttattttttttaaggataattatttagggggtatttcgattatttttgataacgttaaggagttgtgtaaggtagtgtcggtgtttatgggtttgggtgtggaggcgttggagtatttgagtttaggggaatagtttcggggggattgtatgtacgttttatttttgggagttttattcgttgtgcgttttattttttgtgttttattggtcgaatgtaaaggttttttgttagacgatagcgtaggtaagagtattgaagatattgttgagtattttttttttaagggaggttatattaaagggttagaaggcgagagtttaggttgttttggtagcgttgtagtagggagtttcgggatatttgaattgtcgtttattttgtttttttataagttcggagtattggacgaggtagttgcgtattagagtcgcgattattataattttttattggttttggtcggatcgtcgtttttttcgtcgtttttttatttttacgttcgtattaagttggagaattcgttggattacggtagcgtttgggcggttgcggcggcgtagtgtcgttatggggatttggcgagtttgtatggcgcgggtgtagcgggattcggttttgggttatttttagtcgtcgtttttttattttggtatattttttttatagtcgaagaaggttagttgtatggatcgtgtggtggtggtgggggtggtggtggcggcggcggcggcggcggcggcggcggcggcggcggcggcggcggcggcggcggcggcgaggcggaagttgtagttttttacggttatattcggtttttttaggggttggcgggttaggaaagcgattttatcgtatttgatgtgtggtattttggcggtatggtgagtagagtgttttattttagttttatttgtgttaaaagcgaaatgggtttttggatggatagttatttcggattttacggggatatgcgtttggagattgttagggattatgttttgtttattgattattattttttattttagaagatttgtttgatttgtggagatgaagtttttgggtgttattatggagtttttatatgtggaagttgtaaggttttttttaaaagagtcgttgaagggaaatagaagtatttgtgcgttagtagaaatgattgtattattgataaatttcgaaggaaaaattgtttattttgtcgttttcggaaatgttatgaagtagggatgattttgggagttcggaagttgaagaaatttggtaatttgaaattataggaggaaggagaggtttttagtattattagttttattgaggagataatttagaagttgatagtgttatatattgaaggttatgaatgttagtttatttttttgaatgttttggaagttattgagttaggtgtagtgtgtgttggatacgataataattagttcgatttttttgtagttttgttttttagttttaatgaattgggagagagatagtttgtatacgtggttaagtgggttaaggttttgtttggttttcgtaatttatacgtggacgattagatggttgttatttagtatttttggatggggtttatggtgtttgttatgggttggcgattttttattaatgttaattttaggatgttttatttcgtttttgatttggtttttaatgagtatcgtatgtataagtttcggatgtatagttagtgtgttcgaatgaggtattttttttaagagtttggatggttttaaattattttttaggaatttttgtgtatgaaagtattgttattttttagtattattttagtggatgggttgaaaaattaaaaattttttgatgaatttcgaatgaattatattaaggaattcgatcgtattattgtatgtaaaagaaaaaattttatattttgtttaagacgtttttattagtttattaagtttttggatttcgtgtagtttattgcgagagagttgtattagtttatttttgatttgttaattaagttatatatggtgagcgtggatttttcggaaatgatggtagagattatttttgtgtaagtgtttaagattttttttgggaaagttaagtttatttatttttatatttagtgaagtattggaaattttatttttttattttagtttatgtttttttttagatgttttttgtttgttataattttgtattatttttttgtagtgttttgtttaattttttttattgatgtatagtttgttatggaattttatttgttgggtttttttttttttttttttttttttttttttttttttttttttttatttaatttttttatggtatttttagattttgttttttattgtggtttttatttgtgttttgaatggtgttgtatgtttttaaatttgtgatgatttttatatggtttagtgttaagttgtgtttgtttatagtattattttgtgttagttatataaacgtttatttattttatgttacgggaagtttagagagttaagattatttggggaaattaaaataaaaatattcgaattt

SEQ ID NO: 100 - DNA, 3715 bp, Artificial Sequence
  chemically treated genomic DNA (Homo sapiens)
gaattcgggtgtttttgttttgatttttttagataattttagttttttaaatttttcgtggtataagataagtaaacgtttgtgtggttggtatagagtagtgttgtaaataagtataatttgatattgggttatatgaggattattatagatttaaaggtatataatattatttaaaatatagataggagttataatgggaagtaaagtttgaaggtgttatgggagggttagatagggagggaagaagaaaaagaaaggagagaaagagaaaaaaaaagtttagtaaatagaattttatgatagattgtatattaatagaggaaattaaataaggtattgtagaggagtagtgtagagttataataggtagaagatatttgaaagggggtatgagttggggtggggaaatagggtttttaatgttttattgggtgtggaaatagatgggtttgatttttttagaaaggattttgggtatttgtatagagatgatttttgttattattttcggaaagtttacgtttattatgtgtgatttgattagtaggttaaaagtgaattgatgtagttttttcgtaataggttgtacggagtttaggagtttggtgagttggtagaagcgttttgagtaggatgtgggatttttttttttgtatgtaatgatacgatcgagttttttgatgtagtttattcgaagtttattaaagaatttttgattttttagtttatttattggaataatgttgaagagtagtagtgtttttatgtataggaatttttggggggtgatttggagttatttaaatttttgagagaggtgttttattcggatatattggttgtatattcgggatttgtgtatgcggtatttattgaaaattagattaggggcgaagtagagtattttggagttgatattggtgaaggatcgttagtttatggtaaatattatgagttttatttaggagtattgaatgatagttatttggtcgtttacgtgtaagttgcggaagttaggtaaggttttggtttatttgattacgtgtataagttgttttttttttagtttattgaggttagagagtaaggttgtaaaggagtcgggttggttgttgtcgtgtttagtatatattatatttggtttaatggtttttaggatatttagaaagatgggttgatatttatagtttttaatgtgtgatattgttagtttttgggttgtttttttagtggggttggtggtgttggaagtttttttttttttttgtagttttagattattaagtttttttagttttcgggtttttagagttatttttgttttataatattttcgaagacgataagatggataatttttttttcggaatttattaatagtgtaattatttttgttggcgtataggtatttttgtttttttttagcggtttttttgaagaagattttgtagtttttatatgtgagagttttatagtgatatttagaagttttatttttatagattaggtaggttttttggggtggaaagtaatagttaatgggtaaaatatggtttttggtagtttttaaacgtatgttttcgtaaggttcggagtagttatttatttaggggtttatttcgtttttgatataagtgggattgggatagggtattttgtttattatgtcgttagggtattatatattaggtgcggtgaagtcgtttttttggttcgttagtttttgagggggtcgagtgtagtcgtagggggttatagttttcgtttcgtcgtcgtcgtcgtcgtcgtcgtcgtcgtcgtcgtcgtcgtcgtcgtcgtcgtcgtcgttattattatttttattattattatacggtttatataattggtttttttcggttgtgaagagagtgtgttaggatgaggaagcggcggttgagggtgatttagaatcgggtttcgttgtattcgcgttatgtaggttcgttaggtttttatagcggtattgcgtcgtcgtagtcgtttaggcgttgtcgtagtttagcgggttttttagtttgatgcgagcgtggggatggggaggcggcggagggggcggcggttcggttagagttagtggaaagttgtagtagtcgcgattttggtacgtagttgtttcgtttagtgtttcggatttgtagagagatagggtagacggtagtttaagtgtttcggagttttttgttgtagcgttgttagagtagtttaggttttcgttttttagttttttggtgtaattttttttgaaaggggaatatttagtagtatttttagtgtttttgtttgcgttgtcgtttagtagagaatttttgtattcggttaatggggtataaggagtgggacgtatagcgggtggaatttttaaaagtggggcgtatatgtaattttttcgaagttgtttttttggatttagatgttttaacgtttttatatttaggtttatggatatcgatattgttttatataattttttggcgttgttagaaatggtcgaagtgttttttaagtaattgtttttggaggaagtgggagttttcgaggtttttttcgttttttcgttgttgttgttttcggatattgttttttgttgttgttgttgaaggagttgtatggtgttggtttcgtttaggatgtttttaaggttagcggagtagttgtttaagtcggggaaagtggggtttagtagggataacgtggatggggtagttgagttattttcgttcggaggtgttggtagttgttgcggtagttttttgttggcggttacggcggttttaggttttgggacgtaatttttttcggggtggtattttagggtcgattgcggttgtgaaggttgttgttttttatttaggattaggtagtttgtggggtttttacgatgggtttggggagaattatttttattttgttgttgttgttgttgtttggggttagttttttgttgttgttgttgttgttgttgttgttgttgttgttgttgttgttgttgtagtagtagtaaattggcgtcgggaggtgttgcgttcgcggtttttgggtgtttggggttcgggttttggattatttcgcgtacgttttggaatagattttggaaagtttttcggtaggttttggacggcggtcgagggtagattttttttagttttaattgtatttttatttttgagtttggttgaattttttatttattttttttatttcgttttttttttttttgtttagaagagtttaataggttgtgatgatgcggtagtcgttgtagttagttgtttatttgcgggaagttttagagaaggaaatttgcgggagtaattacgtaaaaagcgttttgatagttttaaagtttcgtgtagaagaagatatacggtggataagatttgttttgttaggtttatagtttgttttttaatatttgaagggtagatttaaaagatgtttagattttaaaagaaaaaaataaaattttttattttttaaatttagtgtttattgaagtaggtgtaaataagaattgagttattattttttttttttatttcggtttttttgtttttgtttgttttgttttttggttattgaagatttgattgtttttttattttttgatttttgtttcgtattcggggtggggaaggtaggaggaggtggagagagagtgggggaaaatagagggtttttttcgtcggaattt

SEQ ID NO: 101 - DNA, 12000 bp, Artificial Sequence
  chemically treated genomic DNA (Homo sapiens)
tttttattaagttttagggtttttcgtggttgttgggagttgtagtttgaacgtttttattttggcgagaagcgtttacgttttttttatcgagtttcgcggtaatttttaaagtatttgtatcgttttttcgtcgtttgtagagggcgtagtaggttttgtattttttttgtattttattttttaggttttagatttgttttttttatttaaaaaatatttattatcgagtttttatttgttatttagtattgatataggtatttaggaatataataatgaataagatagtagaaaaattttatatttttataaggtttacgtttttatgtattgaaagtaatgaataaataaattttattagagtgataagggttgtgaaggagattaaataagatggtgtgatataaagtatttgggagaaaacgttagggtgtggatattacggaaagtttttttaaaaaatgatatttaattgatgagaagaaaggatttagttgagagtaaacgtaaaagtttttttttttttattttttatatttgatataatgtaggatttttttaaaatgatttttattaattttgtttttatagttttggtttgtagaattttttattttaaaatgttagtatttacggtattaggtcggcgagaattttgattttgtatttttttttttaattttattttttttgtttttttcggtaggcggattatttgtttttatttgttatggcgattgtttagttttgtgttaggagtttcgtaggggttgatgggattggggttttttttttttatgtgtttaagattggcgttaaaagttttgagttttttaaaagtttagagttatcgtttagggagtaggtagttgttgggtttcggggatattttgcgttcgggttgggagcgtgttttttacgacggtgatacgtttttttggattgggtaagtttttgattgaatttgatgagttttttttgagttacgggttttcggtttcgtgtatttttagttcgggaaaatcgttggggttgggggtggggtagtggggatttagcgagtttgggggtgagtgggatggaagtttggttagagggattattataggagttgtattgttgggagatttgggtgtagatgatggggatgttaggattattcgaatttaaagttgaacgtttaggtagaggagtggagttttggggaattttgagtcggtttaaagcgtatttttttgtatatttattcggtgttgggcgtagggaatttttgaaataaaagatgtataaagtattgaggtttgagatttttggatttcgaaatattgagaatttatagttgtatattttagagtttatggtattttagtgaaaattggggttttatttcgaaatgattatttgggggtgattcggggagtttaagttgttaaggttttataattttcggatttttgttttttttggagcgatttttttaggtagttttcggtttcgttagatggagaaaatttaattgaaggttgttagtcgtggaagtgagaagtgttaaattaggggtttgttcgttaggtcgaggaggatcgtcgtaatttgagaggttcggtagttttgttattgtttggttttatatttatatttttgttttttgtagtagtattttcggtttttttttgtcggagtagtttattatttattcgatgagaggggaggagagagagagaaaatgttttttaggtcggttttttttatttggtagagggaggttgttatttttcgtttgtatttttttttttggattatttagttatggtttttgtaaaggtaggggtatttgttttgatgtaaattttaatttttttttttttttgaatggtgtgttttatttttcgggtcgtttgtaatttaggcggacgttattatggcgtagatagggagggaaagaagtgtgtagaaggtaagttcggaggtatttttaagaatgagtatattttattttttcggagaaaaaaaaaaaagaatggtacgtttgagaatgaaattttgaaagagtgtaatgatgggtcgtttgataatttgtcgggaaaaataatttatttgttatttagttttgggttaggttattttagttttagacgtaggttgaacgtcgtgaagcggaaggggcgggttcgtaggcgttcgtgtggtttttcgtgtagttttcggttcgagtcggttttttttggtaggaggcggaattcgaatttatttttttcgttgttttattttttagttcgcggttgttttatttcgtagtttttttttatgtatttgtcgcgtatcggttattttgtgtcgtatttacgttattttttttttaaatcgaggtggtatttatatatagcgttagtgtatatagtaagtgtataggaagatgagttttggtttttaatcgtttcgtgatgtttattaagttatagattttttttatcgttttagaaacgttttattacgtttttttttagtcgattttcgattttatttttattttgatttttataattattttgtttgttggagaattttatatagaatggaattaggatgggcgttgtggtttacgtttgtattttggtttacgtttgtattttgggaggtcgaggcgggcggattatttgaggataggagttttagattagcgtggttaacgtggtgaattttcgtttttattaaaaaatataaaaattagttgggcgtggtgggtgtttgtaattttagttattcgggagggtgaggtaggagaatcgtttgaattcgggaggtagaggttgtagtgagttaagatcgtgttattatattttagtttgggcgataagaacgaaatttcgttttaaaaaaaaggggggaattatatattatgtgtttatttttgtcgggtttttgttttttaatgtattgtttgatattcgtttatgttgtatatattagtattttgtttttttttatttagtatagtttatcgattgtatattcgtttttttgatggttttttgagttgttttttatttgcggttatgaaataaagttgttataaatatttttgtataattttttttgtgattatatgttttcgtgttttttggagaaatatttaggaggggaattgtggaggaagtaaaaagtagttgtattttgaatttttttagaagttttgagttttttagagcggttgtattattttatattttaattagtaaggtatgggagttattatggttgtgttatagtttttcggatattaggtatgttagtttttttaatgtggtatatttttgtggttgtaatttatagttttttattgattaaggatgtttagtatttttttatgtgtttattggttattcgtattttgtttgtaaagtagtttttcgagttttttatttgttattttggtttttttgtttgtttttattgtttagttgtgggattgttttatattttttggatataagtttttattagatttatgagtcgtgaatgtttttttttgatttgttgcgggtttatttgtttgttttatagagtttatagaattttaagaggagtggattaattttttttatgtttagtatttgttttgttttgtttaggatatttttttttttttttttaattttagggttatgaagatataattttatatttttttttaggatttttatggtggtaagttttatagtaaggtttttaagttattaattaatttttaaaattaattgtttatggtgtgaggtgtaggagttagtttttggtattttttttgtatggaaatttagttattttgtttttatttgttgaaataggttttttttttttattgaatgtttttaattttaattattttatagttggagtatagggttattattttagtgttattttttttttttttttgttaatttttgagatagggatttatattgttgtttaggttagagtataatggtataattaaggtttattgtagtttcgaatttttgggtttaagtagttttttagtagttttacgagtagttgggattattttattatatttagttaattattttatttttttgtattgataggattttattatgttgtttaggttggttttaaattgttggttttaagtttttattttatttcggttttttaaagtgttgggattataggtgtgagttattatgtttgattttttagtgttattttttatttattttttttgttttttgttttttttaaacgttggaggaagaaatagtatttattttatataaattttttagaaaatagaggaatagattgggcgcggtggtttatatttgtaattttagtattttggtacgttgaggtaggggattatttgaggtcgggagttcgagattagtttggttaatacggcgaaattttatttttattaaaatataaaagtagttaggcgtgtattatatttgtaatgttagttatttaggaggttgaggtataagaattttttgaatttgggaagcggaggttgtagtgagtcgagattgcgttattgtattttagtttgggtaatagagtgagattttgttttagaaaaaaaaagaaagaaagaaaaaatagaggaatattttttaatttgttttcgaagttaggataattttggtattaaaattaaataaggatattataagaaaagaaaatatagattaatatttttgttagtatagatatgtaatagttaattaattttagtaaattaaatttggtaatatagaaaaaaggataaataggttagtcgcggtggtttacgtttgtaattttagtattttgggaggttgaggtaggtagattatttgaggttaggagtttgagattagtttgattaatatggtgaaatttcgtttttaataaaaatataaaaattaggttgggtacggtggtttacgtttgtaattttagtattttgggaggtcgaggtgggtagattacgaggttaggagtttaagattagtttgattaatgtggtgaaacgttatttttattaaaaatacgaaaattagtcggtgtggtggtatttgtttgtaattttagttatttaggaggttgaggtagaattgtttgaattcgggaggtagaggttgtagtgagttaagatcgtgttattgtattttagtttgggcgatagagtaagattttattttaaaaaaaaaaaaaattagttgggtatggtggtgggtatttgaaattttagttattcgggagtttgaggtaggagaatcgtttgaatttaggaggtagaagttgtattgagttgggattatattattgtattttagtttgggtaatagagtgagattttattttaaaaaaagaaaaagaaaaaggataaatatattttaattaaataatgtttattttatgattgtagttgatttaatatttaaaaattggtttggtgtagtagtttaggtttgtaattttaatattttaggaggttgaggtaggaagattttttgagtttaggattttaagattagtttgggtaatatagttagattggtttttattggggggaaaaaaattagtttgtgtaatttattatattaataaagggaaatataaaaattttatgattattttaatagatgtagtaaaagtagttaatgatattaatatatatgtatgattataaattaattaattttttagtaaattagggaaaggaaatttaattagtttgataatagggcgtttatagtcggagttttattagtagtatatataatggtagaaaatttagtgttgttgggggcggtggtttacgtttgtaatgttagcgttttgggaggtttaggcgggcggattacgaggttaggagatcgagattgttttgattagtatgttgaaatttcgtttttattaaaaatataaaaataaaaaattagtcgggtatggtggcgggcgtttatagtgttagttattcgggaggttgaggcgagagaatggcgtgaattcgggaggcggagtttgtagagtttagatcgtgttattgtattttagtttgggtgatagagtgagatttcgttttaaaaaaaaaaaaaaaaaaaaaagaaaagaaaatttaacgtttttttttttaagattaggaattagaaaaggatttgatttttataacgttgatattatattggaggttttaattaggtaagaaaaagaaataatgagggtcgggtgcggtggtttaggtttgtaattttagtattttgggaagtcgagacgggtggattacgaggttaggagatcgagttattttggttaatacggtgaaattttgtttttattaaatatataaaaaattagtcgggcgtggtggcgggcgtttgtagttttagttattcgggaggttgaggtaggagaatggcgtgaatttagggggcggagtttgtagtgagttgagatcgagttattgtattttagtttgggcgatagagtaagattgtgttttaaaaaaaaaaaaagaaaaagaaataatgattagtggttcgatgttttacgttagtaattttagtattttgggaggtcgaggtgggtagattatttgaggtttggagttggagattagtttgataaagatggtgaaatttcgtttttattaaaatattaaaaaaatagttaggcgttggtcgggtatagtggtttatgtttgtaattttagtattttgggaggtcgaggtgggtggattatttgaggttaggagtttaatattagtttggttaatatggtgaaattttatttttattaaaaatataaaattagtcgggcgtagtggcgggcgtttgtaattttagttatttgggaggtttaggtaggagaatcgtttgaatttgggaggcggaggttgtagtgagtcgagattgtattattgtattttagtttgggtgataaaagtaaaaatttcgttttaaaaaaaaaagaattagttaggggtagtggtgaacgtttgtagttttagttatttaggaggtagaggtaggagaattatttgaatttcggaggtagaggttgtagtgagtcgagattgttttattgtattttagtttaggcgagaagagtaaaattttatgttaaaaaaaaaaaaaaaaaaggaaagaaaaaaaataacgattagaaaggaagaaattaaatatatttatagttagtatgattttatatatattatggttttaatggggttaggcgtggtggtttatgttgtaattttagtatttttaggaggttgaggtaggtggtttttttgggattagttggttaatatggtgaaattttaattttaataaaaatataaaaaattagttaggcgtggtgagggtatttttaattttagttatttaggaggttgaggtaggagaattgtttggatttgggaggtagaggttgtagtgagtcgagatcgcgttattgtattttagtttgggtaataagagtgaaatttcggtagggtgtggttttacgtttgtaattttagtatttcgggaggttgagttaggtcgattatttgaggttaggagtttgagattaatttaatatggtgaaatttcgtttttattaaaaatataagaattagttgggtgtagtggtgggcgtttgtaattttagttatttgggaggttgagatagaagaattgtttgaatttaggaggtggaggttgtagtgagttgagattatgttattgtatattacgtcgggtaatagagcgagatttcgttttaaaaaaaaaaaaaagatgaaattttattttaaaaaaaaaaaaaagttttaatggaaaatttataaaaagttattaaaattaataaataaatatagtagggttgtaggttatagggtaatatagttatttttttatttgtaggggtttggttttgggattttttatatattaaatttatagatgtttaagttttatatataagacggaatagtatttaatttatatatatttttttatatagtttaaattatttagattatttatattatttttatataatgaaaatgttaatgtatatgtaagtatgtatgtaagtatttgtattatattgtttagggaattattggatagataggtttttaagattgatattagtagttattgttaagattttggttaggtttgtttttgtttggggttttagttgattttattgtttttttatttagttaagggtatttgtattttttttggttttttggttatttggaaggtttagtttagtttggtatatttgtattttggtttattgatgttggtatttttgggaaggttttgttttgaaaaatacggagattttagttgttattgaagatttgagagataaagatagggagatttgtttgtagatttgtgtttttttaagtgggattgagattttgggttttttattttaggatagtattttttggtttgttgattgaatagatttttgaaggaggtgtagttgtattttaggagtgggggtgggagtagtattattgattcgtattaataattatatagttttttttagaataataatatagaataagtgaaatagaataattgtagaaagagttaatttttgttgagtttttattgtgtgtttagtattttttttaattttatattttttataatatatagagtattaggtaggcggggtttgggggtttacgtttgtaattttagtattttaggaggttaaggggggtggattatttgaggtcgggagtttaagattagtttgattaatatggtgaaatttcgtttttattagaagtataaaattagttaggtgtggtggtatatgtttgtagttttagttatttagtaggttgaggtaggagaattatttgaattcgggaggaggttgtagtaagcggagatagtgttattgtattttagtttgggtaataagagttgagatttcgttttaaaataaaataaaataaaataaaataaaataaaataaaataaaaaaagaaaagagtttgttattaaaggagttgtttggtaggggatgttttgttagtgtaaataatagaaaagtgggttgggtatagtggtttatgtttgtaattttagtattttgggaggttaaggcgggcggattatttgaagttgggagtttaagattagtttgattaatatggagaaatttcgtttttattaaaaatataaaattagtcgggcgtagtggtcgatgtttgtaattttagttattcgggaggttgaggtaggagaatcgtttgaatttgggaggtagaggttgcggtgagtcgagatcgtattattgtattttagtttggacgagagtaaaattttgttttaaaaaaaaaaaaaaatagaaaagtgtaataaatatttatagtaggtatgttttttagtaaatttgatgataaatttggtataaagaaagagagtatttttgaaaaaaaaaaaaagaaaaagaaagagagtattttgtttgggtaatatagtgaaattttgtttttataaaaaaatttaaaaattggtcgggtgtagtggtttatatttgtaattttagtattttgggagtcggaggcgggaggattatttgaggttaggagttcgaaattagtttggttaatatggtaaaattttatttttattaaaaatataaaaaattaattaggcgtattggtgggcgtttgtaattttagttatttaggaagttgaggtaagaggatcgtttgatattgggaggtggaggttatagtgagtcgagattatattattgtattttagtttgggtgatagggcgagatttcgtttttaaaaaaaaaaagaaaaagaaaaagattaaaaaattagttaggtaggtttttgtggttttagttatttgggaggttgaggtaggagaattattgagtttaggagtggtaggttgtagtgagttatgattgtattattgtattttagtttgggttttaaagtaagattttgttttaaaagaaaaaagaaagaaagaaagaatatggcgggttaggtatagtggtttatatttgtaattttagcgttttgagaggtcgaggtaggtggattataaggttaggagttttatattagtttggttaatatggtgaaattttgtttttattaaaaatataaaaaattagtaggtagggtggtaggggtttgtaattttagttattcgggaggttgaggtaggagaattgtttgaaattagaaggtagaggttgtagtgagtttagattgtattattgtattttagtttgggcgaaaagagttaaattttattttaaaaaataaataaaaaaataaaataaaaaaaaatatggtagtttttgaaagtttgtttgggagaaggtgcgatgatggttgtataatttcgtgtaagatgttggtttatataggggttgttttttgttttttttcgtttttttaattttttatataataggtttgtgtgttatgtatatttattgagtttaagtaggtgtaaggtattgtgatttaatattttggttagtaagataataagatagattattgttttgtttttaggaagtgtatatgttattagaggaaatagataaaataaataaggaaaagtattagataatgtaagtgttatgagaatgtaaatgaggtgatgtgaattaaaataggatgatttaagtttgtacggaaggtttttatttttatgtttttggttagttaaggaattattagttgattagtagagaagggtagttcgtttagttagagtttttggggaagagggagtggttgttaagagatgagattaaagaagtcgagacgggtttttcgtgagggggggttgtaatgtagggttgaggagtgttcgaagagaatgggtaggtgagcggtgagatagttgtttttttagaagttttgtagtgaaaggaattaaagaaatggagtcgtgtattaggtggggaagggtgggggttaagggggtgtttttttttatatagagattgtaggttgagaatgattatatttttgttaataggaggtgggagtagggtacggtagtttatatttgtaattttggtattttaggaggcggaggcgggtcgattatttgaagtaaggagttcgagattagtttggttaatatgtaaagttttgtttttattaaaaatataaaaattagttgggtgtggtggtattcgtttgtaattttagttattcgggagattgaggtaggagaatggtttgaattcggaaggtagaggttgtagtgagttgagattatgttattgtgttttagtttaggtgatagagagagattttattttaaaaaaaaaaaaaaatataggaagggagttgggaatagggtgtatatttaggaagttttggggatttagtggtgggaaggttggaagtttttttttgattgttttttttttaaagaagtgtatggttggtgtggggtggggtaggagtgtttgggttgtggtgaaatattggaagagagaatgtgaagtagttattttttttttgttttataggaagtcgagttgttttagatattggtatggtgttgggggaggggtttttttttttgtaggtttaggtgatttagggttggaagcgttttatgttggatttttatttttttttttgtagtagttagattgtttttcgggttattgttatggaggagtcgtagttagattttagcgtcgagttttttttgagttaggaaatatttttagatttatggaaattgtgagtggatttattggaagggtaggttattatttcgattttaattttagttttttagtagagatttgtgggaagcgaaaatttatgggattgattttttgtttttgttttttagattttttgaaaataacgttttggtaaggataagggttgggttgggatttggagggttgggggggttggggggttgaggatttggttttttgattg

SEQ ID NO: 102 - DNA, 12000 bp, Artificial Sequence
  chemically treated genomic DNA (Homo sapiens)
tagttagaggattaggtttttagttttttagtttttttagttttttaggttttagtttaatttttgtttttattagaacgttgtttttaggaagtttgaaagataagagtagaaagttagttttatgaattttcgttttttataggtttttgttagggggttggggttggggtcggggtggtggtttgtttttttaatggatttatttatagtttttataggtttgaaaatgttttttgatttagagggggttcgacgttaggatttgattgcggtttttttatggtagtgattcggaaggtagtttggttgttgtaagaggaaaagtggggatttagtatgagacgtttttaattttgggttatttgggtttgtagaggaggaggttttttttttaatattatgttagtgtttgagatagttcggttttttgtggagtaggaaaagaatggttgttttatatttttttttttaatgttttattataatttaagtatttttgttttattttatattagttatgtatttttttgaggaaaagataattagagagggatttttaatttttttattattaaatttttaagattttttaaatgtgtattttatttttaattttttttttgtatttttttttttttttgagatggagtttttttttgttatttaggttggagtatagtggtatgattttagtttattgtaatttttatttttcgggtttaagttatttttttgttttagtttttcgagtagttgggattataggcgagtattattatatttagttaatttttgtatttttagtagagatagggttttgtatgttggttaggttggtttcgaattttttattttaggtgatcggttcgttttcgttttttaaagtgttaagattataggtgtgagttatcgtgttttgtttttattttttgttaataaggatatagttatttttagtttgtaatttttgtatggggaaggatatttttttggtttttatttttttttatttgatatacggttttatttttttgattttttttattgtaaagtttttggaagaataattgttttatcgtttatttgtttatttttttcggatattttttagttttgtattataatttttttttacgaagggttcgtttcggtttttttaattttattttttaataattatttttttttttttaaaagttttagttagacgggttgtttttttttgttaattaattggtggttttttggttagttaggaatatgggggtaggggtttttcgtgtagatttaagttattttattttaatttatattattttatttgtatttttatagtatttatattgtttgatatttttttttgtttattttatttgttttttttaatagtatatatattttttaagggtagggtagtgatttattttgttgttttgttgattaaagtattagattataatgttttgtatttgtttgggtttaataaatgtgtataatatataagtttgttatatgagaggttaagagagcgagaaagagtaaggggtagtttttgtgtggattagtattttgtacgaagttatgtaattattatcgtatttttttttagataagtttttaaaggttgttatgtttttttttgttttgtttttttgtttgttttttgagatggagtttggtttttttcgtttaggttggagtgtagtggtgtagtttaggtttattgtaatttttgttttttggttttaagtaatttttttgttttagtttttcgagtagttgggattataggtttttattattttgtttgttgattttttgtatttttagtagagatagggttttattatgttggttaggttggtgtggaatttttgattttgtgatttatttgtttcggttttttaaagcgttgggattataggtgtgagttattgtgtttggttcgttatgttttttttttttttttttttttttttgaggtagggttttgttttgaagtttaagttagggtatagtggtgtaattatggtttattatagtttgttatttttgggtttagtgatttttttgttttagttttttaagtagttgggattatagaggtttgtttggttaattttttagtttttttttttttttttttttttttggagacggagtttcgttttgttatttaggttagagtgtagtggtgtgatttcgatttattgtaatttttattttttagtattaagcgatttttttgttttaattttttgagtagttgggattataggcgtttattaatgcgtttgattaattttttgtatttttagtagagatggggttttgttatgttggttaggttggtttcgaatttttgattttaggtgattttttcgttttcgatttttaaagtgttgggattataggtgtgagttattgtattcggttaatttttgagtttttttgtagaggtagggttttattatgttgtttaggtaggatgtttttttttttttttttttttttttttttagggatgttttttttttttatgttaaatttgttattagatttgttaagaaatatgtttattgtaagtgtttgttatatttttttgtttttttttttttttgagatagagttttgttttcgtttaggttggagtgtaatggtgcgatttcggtttatcgtaatttttgttttttaggtttaagcgatttttttgttttagtttttcgagtagttgggattataggtatcggttattgcgttcggttaattttgtatttttagtagagacggggtttttttatattggttaggttggttttgaatttttaattttaggtgattcgttcgttttggttttttaaagtgttgggattataggtatgaattattgtgtttagtttatttttttgttgtttgtattgataaaatattttttattaaatagtttttttaatggtaggtttttttttttttttattttattttattttattttattttattttattttattttgagacggagttttagtttttattgtttaggttggagtatagtggtattattttcgtttattgtaattttttttcggatttaaatgatttttttgttttagtttgttgagtagttaggattataagtatgtgttattatatttggttaattttgtatttttagtagagacggggttttattatgttagttaggttggttttgaattttcgattttaggtgatttattttttttggttttttaaagtgttgggattataggcgtgagtttttaagtttcgtttatttagtattttatgtattatgggaaatgtagagttgaggaaagtgttgggtatatagtaagagtttaataaaggttagttttttttgtaattgttttattttatttgttttatattattattttagagagaattgtgtgattgttagtgcggattagtggtattgtttttatttttatttttaaaatgtaattatattttttttagggatttatttagttaataggttaggaggtgttgttttgaaatggggggtttaaagttttaattttatttggagggatataggtttatagataggtttttttgtttttattttttaaatttttagtagtaattaaaattttcgtgttttttagagtaggatttttttaggggtattagtattagtgggttaggatataaatgtgttaggttgaattaggttttttaaatggttagggagttaagagaaatgtaggtgtttttggttgggtgggaaggtaatgagattaattgagattttaaataggggtaggtttgattagaattttaatagtggttgttggtattagttttgaaggtttatttgtttagtgattttttaaataatatagtataagtatttatatatatatttgtatgtatattagtatttttattgtatgggggtaatgtaagtaatttagataatttaaattatatgggaggatatgtgtaggttaaatattatttcgttttatatatgggatttagatatttgtgggtttggtgtgtgaggagttttagaattaagtttttatagatagagggataattatattgttttgtaatttgtaattttgttatatttatttattagttttggtagttttttatggattttttattaggatttttttttttttttgagatagagttttattttttttttttttttgagacggaatttcgttttgttgttcggcgtggtgtgtaatggtatgattttagtttattgtaatttttattttttgggtttaagtaatttttttgttttagttttttaagtagttgggattataggcgtttattattatatttagttaatttttgtatttttagtagagacggggttttattatgttaggttggttttaaatttttgattttaggtgatcggtttggtttagtttttcgaagtgttgggattataggcgtaagattatattttgtcggagttttatttttgttgtttaggttggagtgtaatagcgcgatttcggtttattgtaatttttgttttttaggtttaagtaatttttttgttttagttttttgagtagttgggattagaggtgtttttattacgtttggttgattttttgtatttttattagagttggggttttattatgttggttagttggttttagggaagttatttgttttagttttttaaaagtgttaggattatagtatgagttattacgtttggttttattaggattatggtatgtatagaattatattggttgtgaatgtgtttgatttttttttttttaatcgttattttttttttttttttttttttttttttttttgatatggaattttgtttttttcgtttaggttggagtgtaatgggataatttcggtttattgtaatttttgttttcggggtttaagtgatttttttgtttttgttttttgagtagttgggattataggcgtttattattatttttggttaatttttttttttttgagacggagtttttgtttttgttatttaggttggagtgtaatggtgtaatttcggtttattataattttcgttttttaggtttaagcgatttttttgtttaagttttttaagtagttgggattataggcgttcgttattacgttcggttaattttgtatttttagtagagatggggttttattatgttggttaggttggtgttgaatttttgattttaggtgatttatttatttcggttttttaaagtgttggggttataggtatgagttattgtattcggttaacgtttggttatttttttaatattttaatagagacgaggttttattatttttgttaggttggtttttaattttagattttaggtgatttgtttatttcggttttttaaagtgttgggattattggcgtgagatatcgggttattaattattatttttttttttttttttttttttgagatatagttttgttttgtcgtttaggttggagtgtagtggttcgattttagtttattgtaagtttcgttttttgagtttacgttatttttttgttttagtttttcgagtagttgggattataggcgttcgttattacgttcggttaattttttgtatatttagtagagatagggttttatcgtgttagttaggatggttcgattttttgatttcgtgatttattcgtttcggttttttaaagtgttgggattataggtttgagttatcgtattcggtttttattattttttttttttgtttggttaaaatttttagtatggtattaacgttgtgagagttaaatttttttttagtttttgattttagaggaaaaagcgttgagttttttttttttttttttttttttttttttttgagacgaagttttattttgttatttaggttggagtgtagtggtacgatttaggttttgtaagtttcgtttttcgggtttacgttattttttcgttttagtttttcgagtagttggtattataggcgttcgttattatgttcggttaattttttgtttttgtatttttagtagagacggggttttagtatgttagttaggatagtttcgattttttgatttcgtgattcgttcgtttaggttttttaaagcgttggtattataggcgtgagttatcgtttttagtagtattgagttttttattattatgtatgttgttagtggaatttcgattgtggacgttttgttattaaattagttaagttttttttttttagtttgttaggaggttggttggtttgtaattatgtatatgtgttgatattattaattgtttttgttatatttgttgaaatgattatagggtttttatgtttttttttgttaatgtggtgaattatatagattgatttttttttttttagtaaagattagtttgattatgttgtttaggttggttttgaaattttgggtttaagagatttttttgttttagttttttaaaatgttgggattataggtttgagttattgtattaggttaatttttgaatgttgaattagttataattatgagataaatattatttggttagaatgtatttattttttttttttttttttttttgagatggagttttattttgttgtttaggttggagtgtaatggtgtgattttagtttagtgtaatttttgttttttgggtttaagcgatttttttgttttagattttcgagtagttgggattttaggtgtttattattatgtttagttaattttttttttttttgagatgaagttttgttttgtcgtttaggttggagtgtagtggtacgattttggtttattgtaatttttgtttttcgggtttaagtaattttgttttagttttttgagtagttgggattataggtaggtgttattatatcggttgattttcgtatttttagtagagatggcgttttattatattggttaggttggttttgaatttttgatttcgtgatttgtttatttcggttttttaaagtgttgggattataggcgtgagttatcgtgtttagtttgatttttgtatttttattagaaacggggttttattatgttggttaggttggttttaaatttttgattttaagtgatttgtttgttttagttttttaaagtgttgggattataggcgtgagttatcgcgattggtttatttatttttttttttatattattaggtttggtttgttaaaattggttagttgttgtatgtttatgttaataggaatattggtttatattttttttttttataatgtttttgtttggttttggtattaggattattttggtttcgaaaataagttgggaaatatttttttattttttttttttttttttttttttttgagatagggttttattttgttgtttaggttggagtgtagtggcgtaatttcggtttattgtaattttcgttttttaggtttaagggatttttgtgttttagttttttgagtaattggtattataggtatggtgtacgtttagttatttttgtattttagtagagatggggtttcgtcgtgttggttaggttggtttcgaattttcgattttaaatgattttttgttttagcgtattaaagtgttgagattataggtatgagttatcgcgtttagtttgtttttttgttttttgaagagtttgtgtaagatgggtattgtttttttttttaacgtttaaagagagtagagaatagaggagataaatagaaaatagtattaagaggttaggtatggtggtttatatttgtaattttagtattttgggaggtcgagatgggatgaaagtttgaggttagtagtttgagattagtttgggtaatatagtgagattttgttaatataaaaaaataaaatagttagttgggtgtggtggagtaattttagttattcgtgaggttgttagaggattgtttgagtttaggggttcgaggttgtagtaagttttgattgtgttattgtattttagtttgggtaatagtgtgagtttttgttttaaaaattaataaagaaaaaaagaaaatagtattaaaatggtagttttatattttaattgtaaaataattaaaattaaaagtatttagtagagaaaggaagtttattttaataagtggagatagaataattggatttttatataggaaagatattagagattgatttttatattttatattataaataattaattttaagaattaattaatggtttaaggattttattgtaaaatttattattataaaggttttaaaagaaaatgtaagattatatttttatgattttggggttaaaaaaaaaaaaaaagatgttttaaataggataaggtaaatattgaatataaaaaagattaatttattttttttaagattttgtaaattttgtaaagtaaataaataggttcgtaatagattagaagaaaatatttacgatttatggatttgataaggatttgtatttagaaagtataaagtagttttataattgaataataaaaataaataaaaaaattaaaataataggtaaaagattcgaagagttattttataaataaaatacgaatggttaataggtatatgaaaaaatgttgaatatttttagttaatagagaattgtaaattataattataaggatatattatattagaaagattgatatatttaatgttcggaaggttgtggtataattataataatttttatattttgttagttggagtgtaaaatggtataatcgttttggaaaatttagagtttttgaaaaagtttaaaatatagttattttttattttttttataattttttttttaagtatttttttaagaaatacgaaaatatatgattataaaaagaattgtataagaatgtttatagtagttttattttataatcgtaaatgggaaataatttaaaaggttattaaaaggacggatatataatcgatggattatattaaatgaaaaggagtaaaatattgatatatataatatgaacgaatgttagatagtatattgaaggatagaagttcgataaaaatgagtatataatgtatgattttttttttttttttgagacggagtttcgtttttgtcgtttaggttggagtgtagtggtacgattttggtttattgtaatttttgtttttcgggtttaagcgatttttttgttttattttttcgaatagttgggattataggtatttattacgtttagttaatttttgtattttttagtagagacggggatttattacgttggttacgttggtttggaatttttatttttaagtaattcgttcgtttcggttttttaaagtgtaggcgtgagttaaagtgtaggcgtgagttatagcgtttattttgattttattttatatgaagttttttaataggtaaaatggttatggagattaaaataaaggtggggtcgggaatcgattgggaagagacgtgatgaaacgtttttgggacgatgaaaagggtttgtgatttggtaggtattacggagcggttaggggttaaaatttatttttttgtgtatttgttgtgtgtattggcgttgtgtgtaaatgttatttcgatttaggaaaaagatgacgtaagtacggtataaagtggtcggtacgcggtaggtgtatgggaagaaattgcggaatgaaataatcgcgagttaagagatggggtagcgggagaaatgaattcgagtttcgttttttattaggaagaatcggttcgggtcgagggttgtacggaggattatacggacgtttgcgggttcgtttttttcgttttacgacgtttagtttgcgtttggaattggaatggtttagtttaaagttagataataggtagattgtttttttcgataaattattaaacgatttattattgtatttttttaaaattttatttttagacgtattattttttttttttttttttcgggaagatgagatatgtttatttttgaaagtgttttcgggtttgttttttgtatatttttttttttttttgtttacgttatggtagcgttcgtttaggttgtaggcgattcggggggtggggtatattatttaaagaaggggagggattgaggtttgtattaaaataaatatttttgtttttgtaaaggttataattaagtaatttagaaaaagaaatgtaggcggagaatagtagtttttttttgttaagtaagaggaatcggtttaaaggatatttttttttttttttttttttttttatcgggtgaatagtgagttgtttcggtaaaaagaaatcggaaatgttgttgtaagaggtagaaatgtaaatgtggagttaaataataatagggttgtcgggttttttagattgcgacggtttttttcggtttggcgggtaaatttttggtttagtattttttatttttacgattgatagtttttaattggattttttttatttagcggagtcgggggttgtttggaaagatcgttttaggaaggataaaggttcggaagttgtgggattttagtagtttgggtttttcggattatttttaaatgattatttcggaatggagttttagtttttattaggatgttatgggttttaaaatatatagttatgagtttttaatgtttcgagatttaaaagttttagattttaatgttttgtgtattttttattttagggattttttacgtttagtatcgggtggatgtgtaaagaagtacgttttaggtcggtttaaggttttttaaagttttatttttttgtttaggcgtttaattttgagttcggatggttttaatatttttattatttatatttaggttttttaataatgtaatttttatgatgatttttttagttaagtttttattttatttatttttaaattcgttaagtttttattgttttatttttagttttagcgattttttcgagttgaaaatatacggagtcgagagttcgtgatttagagaggatttattaagtttagttaggagtttatttaatttagggaagcgtgttatcgtcgtggaaagtacgtttttagttcgaacgtaaagtgttttcggagtttagtagttatttgttttttggacggtggttttagatttttgagaagtttaaaatttttagcgttagttttgagtatatgggaggggaaaattttaattttattaatttttgcgaggtttttggtataaagttggatagtcgttatgataagtaagggtaagtaattcgtttgtcggaggaagtaaaggaaatggagttggggaggagggtgtagagttaggattttcgtcgatttggtgtcgtagatattaatattttggggtggaaaattttgtaagttagagttgtgagggtagaattggtggaaattattttggaggaattttgtattgtgttaaatatgaagggtggaaggaagaaagtttttgcgtttgtttttagttggattttttttttttattagttaaatgttattttttaggaaggtttttcgtaatatttatattttaacgtttttttttagatattttatattatattattttatttaattttttttataatttttattattttgataagatttatttgtttattgtttttagtatatggaaacgtaagttttatgaggatatagaatttttttattattttatttattgttgtatttttgagtgtttatattagtgttgggtagtaagtaagagttcgataataaatattttttgaatgagggagataggtttgaagtttggagaatgagatgtagaagaggtgtaagatttgttgcgttttttgtaggcggcgggggggcggtgtaggtgttttaagaattatcgcgggattcggtagggggagcgtaggcgtttttcgttaagatagaagcgtttagattataatttttagtagttacgaggagttttagggtttgatgggaa

SEQ ID NO: 103 - DNA, 3001 bp, Artificial Sequence
  chemically treated genomic DNA (Homo sapiens)
ttgttataattgggtcggtaggggaagaagggaagggggatttggatgggttttcgtaaaataggtgaaaataaggggtgaagagtaggggattgaggaatagtaaaggaaaataaagatattatttttaatagaagagttggaggggggaaaaaaaaagtaagatttaattacgattttttttttatttttagtttttattttttttaaattaggaaatttttatttggaaagaaaaatagatataaaatataaaaacgaaaagtaaatataatagaatagaaaaagtagtattagggaaagtggttaggatagaggtttttaataagattagtaattatagtagcggaaattagaaaagttggaaggggaagattaatttataaatttttgatttgaaagtaatagtgaggaaatagaatagataataaaaggtaaaatatgattaataatttagtaaagtggaaaatggagatgataagtagagttttgaaaagtttttaaaggaagatttcgttttttttattataattttatcgttatggatgtttaatttagtagttattagttaagggtgatagatgagggttattattgcgtaaagcgtttatttttcgaaaagaaaatattatatggtcgtcgtttattttttatagtttttagttttttattttttagtattttttttttcgttgtttaagtaagttttgtgtaattagtatgggggggaggggcggtgtaagataaatggttcggttataaaaaaataaaatttatgtttttattttataataagaaagttaataggtgatagagaaaggtaattttcgtttaggttttaataggatttttattaagtggttttatattattgttacgttacgaaggtgagattttttttggagaaatatataatgatattaatcgtatcgtaaatatttggaaggtattttaaattaagttgggtaagttaaggtgagaaaaatttaattgggtttagaaattagtttttttttttagttttatcgagggtcgaaaaagagtttaagaaagaataaggaaggtgagaagagtttcgtttttcgtaaatattaagattaagggacgtcgagtatcgttttttattgatgttgaggtttttaatatgagaagaatttattggaagaagggagtaaaacgaatataatggcgtcgaggatattattttggattgggtttttttttagtttttttttttttttttaggagttttttgttttcgaaagggatgtaagttaaggaaatagcgaattaattaggttttagcgattagattatcgtttgtgaaaagggtattaggaatttatgtgacgggatgggtgcggagaagcgtagatggaaacggattgtagcgaaggttaaagtttatttaaatagggagagcgcgtatggcggtagtaatagcgacgaaggagggaaatttgtttttattttcggttgtaggtttttttttattttagtttttcgtttttttggttgtaagagcgtaggcgtaagggatcggaaatagggtttttcgcggttatatagattcgtgcgttttaggtttgtttttggaaaatgtttgtttgaaatttgttttaaaatcgtttttaattttattgttatcgttagtaataaaagatataaaggaaattaacgtttgttttttattgttatttttatttttttattttatttttttttatgttttttattttttcgtttaggtttttgttacgtaggttttttttgtaggtattttttcgtggatgcgcgaggaacgagtgtggcgaaggttgcgagtttttacggggtttttggttcggtagtgaaggtgatttgaggattgttgggtacgtattaggaatcggtaggttttagttgaggggagggaggagggaagttttagggaattggattgttcgggggtgtttttcgatttttttttagtcgtggggttggtgggcggtatttttttaaaaggatgttgttcgaggtagttgatgttttagggttagtgagttaggaaggtgttttgaattcgagcgggaagacggggtttggattcggttttaagtgttaatagtagggtttgagggttatattatattttattaatattgtttttgtttttgttttgagatagagtttcgttttgtcgtttaggcgggagtgtaatgttttgatttcggtttattgtaatcgttgtttttcgggtttaagcgatttttttgttttagtttttcgagtagttaggattataggcgttcgttattacgtttagtaaatttttgtttttttagtagagacggggttttatttatgtatgattttaggtgatttatttatttcggttttttagagtgttgggattataggcgtgagttatcgcgttcggtttattaatattgttaattcgagtagaatgtttttggtttcgttttaatagttttattgtttaatttggattttttttttgaatgaaatatttgttattttcgtttttgagatggggagttataaaagtaagatttgatgttttgttgtgtaataaaataataaacgtttggttttttttttgttagtatatttaattatttaatattaaggagtaggtatcgttatttttattttattgatagaagcgaagtaaagtaatatattttaagtagtacggttggtgaggttatagttaggatgtaaatattttttattttttattgtattttgtttttttgtttaaagaatttggttagtaaatatattgtaggttattttattggtttaaatttttggtgaagtaagtttgtttttagtgataaatgaagtaattaatttaagaatggtgttatagaaggtatttttttaagtattatttaatttatttaaaagtatttattaattgttttttttgtgttatatgttgttttaggatttggggatataacggtgaatagttttgtttttatagtgtttatat

SEQ ID NO: 104 - DNA, 3001 bp, Artificial Sequence
  chemically treated genomic DNA (Homo sapiens)
atgtaaatattgtgagaatagggttgtttatcgttgtgtttttagattttaggataatatgtggtataagggaggtagttgataaatatttttgaataaattaaatgatatttgggaaaatattttttatgatattatttttgaattagttattttatttgttattgaagataagtttattttattaagaatttgaattaataaggtaatttgtagtgtatttattaattagattttttgagtagggaggtagaatataatagagaatgagagatgtttgtattttggttgtaattttattagtcgtattgtttgagatatgttgttttgtttcgtttttgttaataagatgagaataacggtatttattttttagtattaaatgattaagtatgttaatagggagagggttaaacgtttgttgttttattatatagtaggatattaggttttatttttgtggttttttattttaaagacggggatagtaaatgttttatttaggaaaaaaatttaggttgaataatggggttgttggggcggggttaagaatattttgttcgaattaatagtattaatgggtcgggcgcggtggtttacgtttgtaattttagtattttgggaggtcgaagtgggtggattatttgaggttatatatgggtgaagtttcgtttttattaaaaaaataaaaatttgttgggcgtggtggcgggcgtttgtaattttagttattcgggaggttgaggtaggagaatcgtttgaattcgggaagtagcggttgtagtgagtcgagattaggatattgtattttcgtttgggcgatagggcgagattttgttttaaaataaaaataaaaatagtattaatggaatgtagtataatttttaagttttattattaatatttggggtcgaatttagatttcgttttttcgttcggatttagaatatttttttgatttattggttttagggtattagttatttcggatagtatttttttgggaaaatatcgtttattagttttacgattgggaaagagtcgggaaatattttcgagtaatttagttttttgagattttttttttttttttttttagttagggtttgtcggtttttagtgcgtgtttagtagtttttaggttatttttattatcgggttaaggatttcgtgggaattcgtagttttcgttatattcgtttttcgcgtatttacggaggggtgtttatagagaagatttgcgtggtaaaaatttaaacgaagagatgaggggtatggagaggagtaggataagagaataaagataatagtggggggtagacgttagttttttttatattttttgttattggcggtagtagtgaagttagaaacggttttaaaataaattttagataggtattttttaaaggtaagtttggagcgtacggatttgtataatcgcggaaggttttgttttcggttttttgcgtttgcgtttttgtagttaagaaggcgggaggttggagtagagggaagtttgtaatcggaagtgaaggtagatttttttttttcgtcgttgttgttgtcgttatacgcgttttttttgtttaggtaagttttggttttcgttataattcgtttttatttgcgttttttcgtatttatttcgttatatgggtttttgatattttttttataggcgatggtttggtcgttggggtttagttggttcgttatttttttagtttgtatttttttcgagagtaaagagtttttgggggaaggaagggaagttaaggggggatttaatttaagatggtgttttcggcgttattgtgttcgttttgttttttttttttaatgggttttttttatattggaggttttagtattaatgagaggcggtgttcggcgttttttggttttggtatttgcggagggcggggttttttttattttttttgtttttttttgagttttttttcggttttcggtgggattgggaggaggagttggtttttgggtttagttggattttttttattttgatttgtttaatttaatttggagtgttttttaagtgtttacgatacgattggtgttattgtatgtttttttaaaaggagttttattttcgtagcgtaatagtgatgtgagattatttggtaaagattttgttaaagtttgggcggggattgtttttttttgttatttattagtttttttattgtagggtggagatatgaattttgtttttttgtggtcgagttatttgttttgtatcgttttttttttttatgttaattatataaggtttgtttaaatagcggaagggaggatattgagaagtgggaggttgagagttatgggaggtggacggcggttatatgatgtttttttttcgaaaggtgagcgttttgcgtagtgatgatttttatttattatttttgattgatggttgttgagttaggtatttataacggtgggattataatagggaaagcggagtttttttttgaggattttttaggattttatttgttatttttattttttattttattaagttattagttatattttattttttattatttattttatttttttattgttatttttagattaagaatttataagttggttttttttttttaatttttttggttttcgttattgtgattgttaattttgttgggaatttttgttttaattattttttttggtattgttttttttgttttgttatatttgtttttcgtttttatgttttgtatttgtttttttttttaggtaaaagttttttggtttagggaaagtgggaattggggatggaaaagaggtcgtgattaagttttgtttttttttttttttttttagtttttttgttagaaatagtatttttgtttttttttgttgttttttaattttttattttttattttttgtttttatttattttgcgagaatttatttagatttttttttttttttttttttgtcggtttagttatggtag

SEQ ID NO: 105 - DNA, 3001 bp, Artificial Sequence
  chemically treated genomic DNA (Homo sapiens)
gaagatgagggtttttggaaatttgagggaacgataaagattattttatttgggaagatcggtaggagtttttatgggggtttagaggggttgatatttatttttacgtttagggagttgtcgttaaattaaataagggaggatataagagggtaggagtgtgagaaaggatgagaaagtaggggtgattttagatgagttatggtttgtgaatgggtttaggttttgggtttattttttatttattaagggttagagaaaggttggggatataatatcgggatattttgtttcgggtaacggaagagttgcgtttgtttttcggttattttatttaggttagaatataaggtgttgtttgtaagaaatgttgagcgtcggggggtcgttcggtggttttagtttatagatcgtatataagttttcgttttattttttattggtttcgttcggttagatttatcgttcgtttatttgaaaagtgatataattagggcgttttagttttttttttttcgatttcggaataattcgacgttttagtagggagtagagtttttttttgatttttgtattttttttaatgtataacgagttttttgtttcgtttttttttagatggcggatttcgtatttgtttagattttttttttaggttttcgtttttttttcgcgtgttttagggatagtttgttatagttttttttttttttcggtgttttattttgtagattttagtttttcgggttaagtaggttgtcggtgaagaaacgcgtcgggttagtaatttcgttgagtagtattagtttcgttattttttttttttattttttaattaggagacggtttttaaggttcgtttttttttattattaattaattagttgatttttttaaaaaagggggcgtttcggaagttttatcgattagtaagagatttgggtgttgagtacgtgaattaatagatgcggatgattgtgtaggcgggtttaatgggagtatagtagtaggaagtaatttttagatagtgttatatcgttaagcgtatgcgttaaataggttttagtgataaagcgtttgggagatgtagtatttagtattaaggtttattattttttttagttattattaagtttagtttagatagtttttatgtgttttcggagatagataagttttttaaaaggggcgtattgtgattattgttattttttttaggaagttaaaagttgagaatgggatatgggttgaaattttttttttggttttttatttttaaattttatagtatagattataatttataagtttttgttttttttaaggtttaatttttaattagttaaatattttgcgtagattttgagttagttttgtattttggttttttttttgaatgattattttttttagttttttttgggttgttcggtttttgggatttatcgttagtatttttttgaggttagtagttgttttttttaggtttttaagggtagtttgggtaattttttttcggtataaggtttttaaatggttaggttttcgttttaatattcggttatagttttgggttgttaattgaggttgttttagtaataattgataggtagttagattggtatgaaggatagttcgttttggagggttaggtgggggtaaagttaggagtagtcgaagagttcgtttatagtatcgggtagtttttttagggtttttagttcgaaatagttttgtgttttttgtacgtttttttttggttagggtttttttttcgttagtttttagtttttaggagtttcggttttgagtgaaggatgttagtgtgagtttgataggaggtttagagtgtttaggtagttgaagttttgtttttttattttgatatatggattttaagtatttttttatgagttttttttaagttttttttttttatggttttacgtttatagttagttttgtttagttttttggcggttttgattcgaaaggaaattttaaagttagtattcggtagtaggagtttagtttgggtttgtttaagttatggttacggattacgatttttttgataaagtttttatcggggtagtattagagattagaagtttgaagggtttttggtatttgattggttgatttatgagatttatgagagttttttttaagtttagtaattagttttttagttttttgagtatgttttagaatttggttggttggatttgggtttatttttagtttaagcgtttcggtaggagggtttcggggttgttgtttaatttgaataattgaattaaggttttttcgaaggttttttttttatttttgttgcggttgagaggtgtttttttttttaattgtattgattggtggcgtttttatatggatgtttagttttttttacggtgagtgaatagttttggttagaaagggatgaattaggtttaggttagtatttgaaaagaaaattaaataatgttaatagtagggtttttatttagatttttttttcgtttttttttatttttttgagatttaggtttttagttttgaaagtttttagttttgtttttttttaaaaatttgttttagttttttcgttttatttatatataatttagaattataaattttataattttttgcggttaaggtagtcgcgttaattacggatattcggtcgggttaataagtatttgcgcggttaaagtgtttggtatggtgataggaggagtcgggttattcgaattatttttttttttaaagttaaatggttattgaatgttgttttcggagttttgttttacgcggagagggtagtcggagaggggcgcggtgcgggaggcgggggtagggggcggaataattgggaaagatattgataattaattttggagttcgcgagatttcgaatttagttaaatttttggtagttaatcgggagaagggaggaatttggttagttcgtttattgaacgtgatattatttttttcg

SEQ ID NO: 106 - DNA, 3001 bp, Artificial Sequence
  chemically treated genomic DNA (Homo sapiens)
cggaggaaatgatgttacgtttaataggcgggttaattagattttttttttttttcgattggttgttaggaatttgattagattcggagtttcgcgggttttagggttagttgttagtattttttttagttgtttcgttttttattttcgtttttcgtatcgcgttttttttcggttgtttttttcgcgtggggtaaggtttcgagggtagtatttagtagttatttagttttggaaggagaggtgattcgaatggttcggttttttttgttattatgttaggtattttggtcgcgtaggtatttattgattcgatcgggtgttcgtagttggcgcggttattttaatcgtagggaattgtggaatttatagttttaaattatatgtgggtggaacggggaagttggagtagatttttggaggaaagtaaaattggggatttttaggattaggggtttgggttttagaagaatgggaaaggacgagaaaggagtttaaataagaattttgttattagtattgtttggttttttttttaggtgttgatttgaatttggtttatttttttttgattaaaattgtttatttatcgtggaagggattaagtatttatatggagacgttattagttaatataattggagaaaaggatattttttagtcgtaataagagtgggaaaagaattttcgggagaattttgatttagttatttagattaggtagtagtttcgagatttttttatcgaaacgtttgagttggaagtaagtttagatttagttagttaaattttagagtatatttaaggagttgaaaaattggttgttgaatttgaaggagatttttataagttttatggattaattagttagatgttagaggttttttaagtttttgatttttggtattgtttcgatgggagttttgttaagaagatcgtaattcgtggttatggtttggataaatttaaattaggtttttgttgtcgggtattggttttggggttttttttcggattagggtcgttagagggttggatagagttaattatgggcgtagggttatggagggaggaaatttggggggagtttatagagaaatgtttggagtttatgtgttaaggtgaggaagtagagttttagttgtttgggtattttggattttttgttaggtttatattggtattttttatttaaggtcgagatttttgggagttggagattagcgagaaggaagttttggttagggaagaacgtgtaaggggtatagaattatttcgagttgggaattttgaaggagttgttcgatgttatggacgggtttttcggttgtttttgattttatttttatttggttttttagaacgaattgttttttatgttaatttggttgtttgttagttgttgttagggtagttttagttggtagtttagagttgtgatcgggtgttggagcgggagtttggttatttaaaggttttatatcgaaggggggttgtttaggttgtttttgggaatttggaaaaagtaattgttgattttaagaaggtgttggcgatagattttaaaaatcgggtagtttaggaggaattggggaaggtggttatttaggggaagaattaggatgtagggttggtttagggtttgcgtaagatgtttggttgattaaaagttaaattttaaaagagataggaatttgtgaattgtggtttgtgttgtgagatttgggggtggggggttagagggaaggttttagtttatattttatttttagtttttggttttttaggggaggtagtagtggttatagtgcgttttttttgaggggtttatttattttcgaggatatatagaagttgtttaaattaaatttagtagtggttgggggagatggtggattttaatattgggtattatattttttaggcgttttattattggagtttgtttggcgtatgcgtttggcggtatggtattgtttggaagttattttttgttgttgtgtttttattgggttcgtttatatagttattcgtatttgttgatttacgtgtttagtatttaggttttttattggtcggtagagttttcgggacgtttttttttttgaaagagttaattgattagttggtgatggggagaggcgggttttgggaatcgttttttggttggggggtgggggggaaagatggcggagttgatgttgtttagcgagattgttgattcgacgcgtttttttatcgataatttgtttagttcggaggattggggtttgtagagtgaggtatcggggaggggagagggttgtggtaaattgtttttgaggtacgcgggaaagaagcgggggtttaaagaggaagtttgggtaaatacggaattcgttatttgaaggagagcggagtagggggttcgttgtgtattaagggggatataaaagttagggaagaattttgttttttgttggaacgtcgagttgtttcggggtcggggaaggaggggttgaagcgttttggttgtattattttttaagtgggcgggcggtgggtttggtcgagcggagttaatgagggatggggcgggggtttgtgtgcgatttgtaggttggggttatcgaacgatttttcgacgtttagtattttttgtagatagtattttgtattttggtttagatgaagtggtcgaggagtagacgtagttttttcgttgttcggagtaggatgtttcggtattgtgtttttagtttttttttaatttttggtgggtggaaagtgagtttagaatttggatttatttataggttataatttatttggagttatttttatttttttatttttttttatatttttgtttttttgtatttttttttatttagtttgacggtagttttttggacgtggggatggatgttagtttttttgagtttttatgggaatttttgtcgatttttttaggtaaggtagtttttgtcgtttttttagatttttagaaatttttattttt

SEQ ID NO: 107 - DNA, 5477 bp, Artificial Sequence
  chemically treated genomic DNA (Homo sapiens)
tataaggattgtgggttttttaggggtttcgtgttaggagttagaaggggtatagattgtttttttttaatagttgtattatttgtttagagttagattgagtttggagggttttggaagttagaaggattgatatggggttggaggtagggaaaggttgttggaagagggagaaattgaggatttacggtttttaggtagtttgatttgttttaggtttggttggggtttgttttcgttataggtggttacggtttttttgtaagaattgttggggtttttattatagttgtagtatcgtattcggttttttggtaggagaaaagaggcgttggatttgggttttcggtggagtcggttggtagaaggtttgtgtgagaagttagttggtcgtttttttatttaaggtagtttttagtagggagttgagtaagattttaataaattggggttttatcgtagtttgttcgtgttaggatcgtttttattttttgtttatttttttttttagttcggttttgtttgttttatatttttcgtgttttgagttttatagggttataaaaaaggaagaaagagttttttttagtaggtattaagggttttagtggggatagggaggggttttatagtatgtttttagtattttttggagtttttaaatttttttatttttagtagtagtttgtggattaataagaatttttgaggatttttgatatttttttatagggtttttgagggttttttttttgtaattatttgtgtaaggttagattttttttatatattggattttaacgaaaataatatattttaatagattgaatgtagaagtagataggaaaatttaggtattttttacgaagtttgatattagatttataaaaatgtaaagtaatgtttagttttttattgtgttgtggagaaataatagttattttttataaaattgtattttgttagtatgtaatattttattatttttattgtttaaataaattaataaatatttattttaaattttttgttttaatttttaatgtagtaaatattgatataattttataaagaaaagttttttagagttttaagtaattttgaaaagtgtaaagaggttttgagattaatatttttgaaaagagttgtttttttgggtatttgtgttttttttatttttattttttgtttttagttttattttttttggtatatgttggttttgattttttagatgggttttttttttttttagtttttttaattttagttttttaggttgtattattatttttttattttaaattttatttatgtttttttttttagtgatttttttttagtgtaagtatattagtaggttttttagttttattcgtggttattttttttttttaaggtagtaaagttggtagggataattatagggtaggaatgttgaagtttggggggattaaagggatttgaagttgggtggggttcgtttttatatagttgggttttgtgtgtgtatgtgggtgtgtgggtgggggtattgttgattttatatttaaatagatttacgtcggggttgtttaggagggtgattttgagagatatgaaagtattgagggggaaagatagagaaaataaagatagagagaagttgagagagttagggagtagtttgagatatggggagggagggggaggagtaggagggaaggcgatagatataatttaggagtaggagaggaagttaagttatagagataatatgttgagagagtagaggagattttttaggtaagggtagattttttgtaggggtaggttgggggttttcgttgtttgttgggttaggttggtgaatttggttatggtttcgttttttagatttattttttaggtgtgtttgtttattggttttttattgttttgtttaaatgttttaattttataaatttcgggatttcggggtgtagattattttttttagatttttgagtttgtgtttggttatgggtatttttagtatttttttttgcgtgttgtttttttgtggggtattgggtaagggtgggttggggaatttttagtggttagggggttgggggtggggataagggtatgtggaggaatttgagggttggggaggagaggggtgtgggtgttggaagaggttaagaagagagttgggggagtgggggattttagggagattagttattgggaaggttagtttgatgaggtgggaaaggaagagtttttttttaaggtatttgagaataattgttttttttttgttgtatttttgattcgtttttgttttttttattttttattttacgtgttgtttttgtgttgggttttttggttaatgttaatttttatttttttatttgtttttggtgttatttatttaatttttttattgatttttttaatttttttgttgttgggtttggttttttgttttattttttttatgttggtttttgatttttgtggtttttgtttatgtttgcgtattttttaatttttgtattttttttgtttttatttttgtttttttttttgtatcgtttttttttttttttttgagatagagtttcgttttgttatttaggttggagtgtagtggtatgatttcggtttattgtaattttagttatttagatttaagagatttttttgttttagttttttaagtagttgggattagaggtatgtgttattatgttcggttaattttttgtatttttagtagagacggggttttattgtgttagttaggatggttttaattttttgattttatgattagttcgtttcggttttttaacgtgttgggattataggcgtgagttattgcgtttagttattttttttatttttgttagttttttttttttattttatagtttttttttttttgttttatgtgttatttttttttgtgattttttttcggatttggtttttgtttgttttatagggagggtttgttttttttgtttttttaatttttgttgttttaataggttttattatgttttttgttcggggaaggtttcgttgttatatttgtggttttattaaattttgttattttgtttttatcgagtgtcgggacgatgaagtttgtggtattagtattggtattttaggtaggattttggtttaatggtttttttttaggaggttttttatttttatttattcggttttttttgtggttttcgttttagtatgttttttttattttatagattagagtgagattattgagtgaaaaagttgttttttaagggtttagtgttttttgttaggttatgttatttattggttgtatttttatattttgtggtattattgttgcgagtaggatttgtgtaatatagtcgtttttttatagtagtttattagttttttcgtttttttgtttttttttgtggttagtttcgttgggagaggatattttttttattagttttcgtggatttgtagtttttaatttaggatatttttcgttattattgcggttttggaaatatttgtatagatattttgagatatgttcgagaatttaattttgtatagagattttagattttttagtagattttttatagattttttataaggtttggggaggtatttgtttagagtttaattttataaagaatatttattttgcgttttttgttttttttagatgtttattgttgatgtttcgtgttagtttaggttattggtaaggtaggtattttgatgatattgtggattttaggtaaggggattaaaggagtattaggtatggtaaggaggagagttttgttaggaaagattaatgtggtaggtcgggaatttaggatggagggtttgggggattatgaagagtatttttaataaaaggtttatttaggagtttagtaatattgtagatattgtagtgtgtgtgtgtgtgtgtgtgtgtgtgtgtgtgtgtgtgtttgtgtgtgtgtgttttaagagtaaattgtagttgtttggtgggttgggttggagttggaatttggattacggtattttttttattttttatttgtgttattttcgtttttttttttgttaatggtttagtttaagtttttgtagtttgaaggttttaggtgagatttttgagaaagtttttttttagtaaggtttaagtttgagtagagatataaaagggtatttagtggagttgtttgtgagggtgtggttggagtttagtttatttttgtttgagattagggaatggttaagttgggagtattaatattttttttcgttttattagtttagattcgtttatggtttatagatattttagtatggtttcggtttaataaataatatatttttattgggtttgttagtttgagtagatattttttttgttttcgagaaatagggtgtgattttagggtagtaggaaggaagtgttagagtggcgatagttgtttatatgttttgaatgtttcggtaaggcgttatagggaagagtgtgtgtttaggataaggaaggataaggagggggtttcgggtgggagttgagtataggtatttttattttgatttagttttttttttttgtatgtgaggaagtttggggttgattaaatatgtttgtttttttttttttttgtgaggatgagatatggggtagtgggggtttggtttaatttagagatgggttgaggttttttattttttttgtttttttatttttttattttgtgtttttatttttttttttttgtttatttttttttattttttttgatttgagttttttttttttttttttttttttcgttttttttatttgttttttagttttattgtaatggattttttattattgtttaagtttttagatttttgttttttttttgtgtatatttattttttttgtttttattagtaattttaggttttttttaattttatagtattatgggtttagggttatttttttattgttgttataagataggagattaaatttttttgtaggttatattatagaataatgtttttttttttttttagttttttatttttttttatatatagtttggtggttgttggaggttagttggatggtgaagtcgaatttttagtttcgttttttttgttaaggttgtcgaggaattttttaggtgttagatggttagcgagatagtaggttatattttttagtagatgttattaaaattatttgggtttgtgggtaggtgggttgtggggttttttagagagatagattaaggatatttttattttttatatttttaggaacgagggtttatttttaatttaattcgtgttttttttttatttttagttttttttaggatttaagtttttgttttttagttgttttttatttaagacgggttaaatggatgtttttatagatttggatttcgggtttgaattgaggaatcgaggtatttggggagaaggag

SEQ ID NO: 108 - DNA, 5477 bp, Artificial Sequence
  chemically treated genomic DNA (Homo sapiens)
ttttttttttttagatgtttcgattttttagtttaaattcgaaatttaggtttatgagaatatttatttggttcgttttgggtgaggaatagttagggaatagaggtttaaattttggaggggattggggatggagaggaaatacgggttgggttggggatgggttttcgtttttgaggatgtgaaaagtagaggtatttttaatttgtttttttggaaaattttatagtttatttgtttataagtttaggtgattttggtgatatttgttgggaagtgtgatttgttgtttcgttggttatttggtatttggaagatttttcgataattttagtaaggggggcgggattgagagttcgattttattatttagttggtttttagtagttattaagttgtgtatggggaggggtgggggattgaaggaaaggaggagtattattttgtgatgtaatttataaaaaggtttggttttttgttttgtagtagtagtggagggatggttttgagtttatagtattgtggggttgaggggagtttgaggttgttggtgggggtaaggaggatgggtgtgtatagggaggagataggaatttggagatttgagtaatggtggggaatttattgtagtggagttgaaggataaatggggaaaacgggggaagagagagaagggaagagatttaagttagagaaagtggaaagagatggatagagggagaaaaatagaagtataaagtgggaggatggagggatagagaaaatggaaagttttaatttatttttaaattaagttagatttttattattttatgttttatttttataaagaagagagggaataggtatatttaattaattttagatttttttatatgtaaggggagggaattgagttaggatagagatgtttgtgtttagtttttattcggggttttttttttatttttttttattttaggtatatatttttttttgtggcgttttatcggggtatttagagtatgtgagtagttatcgttattttggtattttttttttgttgttttgaggttatattttatttttcgggggtagagggagtgtttatttaggttggtaggtttagtgggggtatgttatttattgggtcggggttatgttgggatgtttgtgaattatgggcgagtttgggttggtgaagcgagggagggtattgatgtttttaatttggttattttttagttttaggtagaaatgagttgagttttagttatatttttataagtagttttattgggtgtttttttgtgtttttgtttaagtttgggttttattggaaaaaagtttttttagaagttttatttaaagtttttaggttgtaggggtttaaattaagttattggtaagaaaaaggacgaaaatgatatagatggagaatgaggggagtgtcgtggtttaggttttagttttagtttaatttattaagtagttatagtttgtttttagagtatatatatatagatatatatatatatatatatatatatatatatatatatattgtagtatttgtagtattattggatttttagatagattttttattaaaggtattttttatagttttttaagttttttattttgagttttcgatttattatattagttttttttagtaagatttttttttttattatatttgatgtttttttgatttttttgtttgagatttatagtgttattaaaatgtttgttttgttagtgatttgggttgatacggggtattagtaatgggtatttagaaaagataaaagacgtagaataggtgttttttatgaggttggattttgggtaggtgtttttttaggttttgtgaggggtttgtgaggggtttgttgagagatttggggtttttgtataaaattaggttttcgggtatgttttaaagtgtttgtgtaggtgtttttagggtcgtagtgatggcggggggtattttgggttgggggttgtagatttacggaagttagtggaggaggtgtttttttttagcgaagttggttataaagaggggtagggaggcgaggaggttggtgagttgttgtggggaagcggttatgttgtataggttttgttcgtagtagtggtgttatagagtgtaggagtgtagttagtaggtggtatagtttggtagagggtattgggtttttgagaggtagtttttttatttagtgattttattttggtttgtgggatgaaagaggtatgttgaggcgggggttataggaaaggtcggatggatggaggtagggagttttttggagaagggttattggattagagttttatttgaagtgttaatattgatgttataagttttatcgtttcgatattcggtgggaatagggtggtagggtttggtgaagttatagatgtagtagcggagtttttttcgggtaggggatatggtgagatttgttgaggtagtagagattaggagagtaggagaggtaaattttttttgtggggtaggtagaggttagattcggagagggattatagagagaggtgatatatgaagtagagagaggaaagttgtggaataagggaggaaagttgatagaagtagaaaaaatagttgggcgtagtggtttacgtttgtaattttagtacgttgggaggtcgaggcgggttgattatgaggttagaagattgagattattttggttaatatagtgaaatttcgtttttattaaaaatataaaaaattagtcgggtatggtggtatatgtttttagttttagttatttgggaggttgaggtaggagaattttttgaatttgggtggttgaggttgtagtgagtcgagattatgttattgtattttagtttgggtgatagaacgagattttgttttaaaaaaaaagagggagacgatgtaggaaaagaaatagagatggaggtaagaggggtatagggattgagagatgcgtagatatgaatagaagttataagaattagagattaatataaaaagagtgagataaaaagttagatttagtagtaggaaagttgagggggttagtgaaaaagttaagtaaatggtattagagatagataggaaaatagaaattgatattgattaaagggtttagtatagaagtaatacgtgaaataagggataggggagataggggcggattaaagatgtagtaagggggagatagttatttttaaatgttttgaaaggaaatttttttttttttattttattaggttggtttttttagtggttggtttttttgaagttttttatttttttagttttttttttggttttttttagtatttatattttttttttttttagtttttaggtttttttatatgtttttgtttttatttttagttttttgattattgaaggttttttagtttatttttatttagtgttttatagaggaatagtacgtagaggaagatgttggaggtgtttatggttagatataggtttaggaatttgggagaggtgatttgtatttcgagatttcgggatttgtagagttggagtatttgagtaagatagtgaggaattagtaaataaatatatttagggagtgaatttggggggcggaattatgattagatttattagtttgatttagtaggtagcgggggtttttagtttgtttttgtaaggagtttgtttttgtttggagggttttttttgtttttttagtatgttgtttttgtaatttagtttttttttttgtttttgagttgtgtttgtcgtttttttttttatttttttttttttttttttatgttttaagttgttttttggtttttttagtttttttttgtttttgttttttttgttttttttttttagtgtttttatgttttttaaagttatttttttaaatagtttcggcgtggatttgtttgagtgtagaattaataatatttttatttatatatttatatgtatatataaagtttagttgtgtaagggcggattttatttagttttagatttttttgatttttttaagttttaatatttttattttgtaattatttttgttagttttattattttggaggaaagaaataattacgggtggggttggagggtttgttgatgtgtttgtattggggagaaattattagaaaggaaggtatggatgggatttggggtaggggggtggtgatatagtttggaaggttggggttgaagagattgggaaggaggaaggtttatttggggaattagagttagtatgtattaggaggagtaagattaggaatagggagtgaagataggggagatataggtgtttaggagagtagttttttttaaaaatattgattttaggatttttttatattttttaaagttatttaagattttgaagagtttttttttatgaggttatattaatatttattatattaaaaattaaaatagaaaatttaaagtaggtatttattgatttatttaaataataaaaataataaagtattatatgttaataaaatatagttttgtgaaaaataattattatttttttatagtatagtgagaagttgagtattgttttatatttttgtgaatttagtgttaggtttcgtgggagatgtttgggtttttttatttgtttttgtatttagtttgttgggatatgttgttttcgttgaagtttagtatatgaagaaaatttgattttatatagatagttgtaaaaggaggatttttaaggattttgtgaaagggtattagggatttttaggggtttttgttggtttatagattgttgttgaggataaaggagtttgaggattttagaggatgttgagagtatgttgtggggtttttttttgtttttattggggtttttggtgtttgttgggggagatttttttttttttttttatagttttataaagtttaaggtacgggggatataaggtaggtagagtcgggttggggaggggggtgggtaggaggtagaggcggttttgatacgggtagattgcgatgaaattttagtttgttgggattttgtttagttttttgttaggggttgttttgggtaaggaggcggttagttagttttttatataggttttttgttagtcggttttatcgagggtttaggtttagcgtttttttttttttgttaggaaatcgaatgcggtgttataattgtggtggaagttttagtagtttttgtaaagaggtcgtgattatttgtggcgagggtagattttagttaggtttggaatagattaagttatttggaaatcgtgagtttttagttttttttttttttagtagtttttttttgtttttagttttatgttaatttttttggtttttagaattttttaggtttagtttggttttgggtagatggtgtagttgttagaggagagtagtttgtattttttttggtttttggtacggagtttttgagaggtttatagtttttgtg

SEQ ID NO: 109 - DNA, 3001 bp, Artificial Sequence
  chemically treated genomic DNA (Homo sapiens)
ggatttttgatttggtatttattaggattgaaattatttttttgtttgggttgatcgtaggggatgtcgttgattttattttcgtagcgttaggaggtattatgattatcgttgaggagatagaagatttcgtttcgttttagcgttttatggttatatacgatgaggcggttttttcgtggttttcgttgtttttgtgggaaagggaattgggtgttatagaaggagattttaggggtttagaggtagggatagagaatttattattttttaaatgtaattatatgtatggtttttttgagtttagtttttgtttattgagggttttagttagattttataaatatatattttgtttgaattaagaagtttttttagggtgtatagttggatatgtgtattaggggtttagttatagggtgtatgagagtttaaatttaatttgtgtttattcgttaagttgtgtattttggtataggtttgtgtttgtttaaagaggtagtgtttttttttattttgtatgagggtattgtatggattaacgtagttttgttgataatgttaaatgggaagttaatggtagagttttttttttttttgataatgtgtttttattaggatgttttgttttttaaggaattttatttaagttagaaaatttgattttagagaattttttttttggaaaggagtttatttgggggtattttttagattttttataaggtagttttttttatttattttttaggatagagatttgaatattagagttcggtttaggggtaaatattttagtgttaatatttagggagagatttcggggtgtgttttaggaaatattattatttttgttttatattaatatggtagaggttatttggtagtcggttttgtgagtataaagggagtagaaaagaaatattatttttgttttaatatcgtttattattgttttaaggtttagtttatcggggatatttttattattgataatgaacgttgtaggagattatgtgttgtttgaaaaaaattggaggaagaaatttagagtgagtattttgtaggtattttttttattatttttcgttaattttttattttttgttagggattttaggtttttcgatggttttagggtgtaatttaatatttgtattatttatattttttgttttgttttatttttttttattgtatttattattttgtaatagataaaaaagtttatttgtttattatgtttgtttgtttttttttagtataatttaaattttgagggtagagatttttgatttgttttgttcgtggttatatttatgaaatttaaaatagtgtttggtataggtatatagtatttaataaatgtttgttaagtgaatgtttaattttttggtgattttaatttttagattattgttttagatatttgtttttttcgggttttttttattttttagggatttaggtaattaattttttaagtttttttatttttagggtttttgggtttattgggttgtttatttatttaatttagtatcggtttttttatttagatatttttatattttggtttatggattttcgtagggcgatgaatttggtttttttatcggatgaggatatttttttcgttttagtaaaggcgagaagagtgtttcgcggagtggttgtgatgagcgggatgcggaaggtgtttattgagtcgatttgtttttcgtttatttatagtagttgttttatggttattagcggttgtatttgttatgggaggaggaagggttaataaagataaatttgttttgggggttttaggaatttacgtttcgatgggagagggaggatttaatggggatttcgagtaggggatggggttttagaataagaaagaggaatacgaaggggagtttggagcgaagttggaggttcggagtaggggagggtttacgaaaggagaaggcgtttttagggagggaaggggattttaaaagaggaaggggttcgaatgaggagaaggacggggattcggagagggagaggggttgggagcggtaggaggaaacggggtttgggagaaagaaaagggttttgtcgcggaaagtcggtttagtcgttcgcgtttcgggggatattaggtgtcgattatttgcgcgggtcggggatggggttatgtaaagggtgatttattagatcgaagtcgtttttagttttggattaggaggttgttagagatagtagtaggaagatcgcggtaaatatttaaattttatagtttttttagaagtttagaattcgcggtttttagcgtttgttcgggagcgtcgtgttgggtcgttttttagttattttttttcgtagttgtcgcgattttggtagttagattttatagagtcgggagttagttgattcggattttttaaagcgtagatgttatttttaagttcgtttcggtttggaggtttcgtcgcgtttttcggattttaattggtttttaagtagtttatttttttttacgtgattacgtagtatttcgaagtttgttttttcgattggtttttttggaggtttttttggaggttcggagcgcgtgattcgaacgggaagcggattggttggggtgaagaagggattggtattatttttattgggttttttgattggtcgcggtattaggatacgttataggggcggggtcgattttaaagagtcgggcgcggaaaaaaaaaggtcgtttgtcgtcgtggagagaatgagttatagatttattgagttaataaaatatttttaataaaatttttttgtttgtttgttttgttttggagatagagtttgttatttaggttggagtgtagtggcgcgatttcggtttattgtaatttttgtttttcgggtttaagcgatttttttgttttagtttttcgagtagttgggatgataggtgtatgttattattttcggttaatttttgtatttttaatagagacggaggttttattat

SEQ ID NO: 110 - DNA, 3001 bp, Artificial Sequence
  chemically treated genomic DNA (Homo sapiens)
atggtgaaattttcgtttttattaaaaatataaaaattagtcgagagtggtggtatgtatttgttattttagttattcgggaggttgaggtaggagaatcgtttgaattcgggaggtagaggttgtagtgagtcgagatcgcgttattgtattttaatttgggtgatagattttgtttttaaaataaaataaataaataaaaagattttattaaagatattttgttaatttagtaaatttgtgatttattttttttacgacgataggcggttttttttttttcgcgttcggttttttaaaatcggtttcgtttttgtgacgtgttttggtgtcgcggttaattaaaaagtttaataaggatggtgttagttttttttttattttagttagttcgtttttcgttcgggttacgcgtttcgggtttttaagagggtttttaagagggttaatcggaagggtaagtttcgagatgttgcgtgattacgtgggaggagatgagttatttgaagattaattagagttcgggaagcgcggcggggtttttagatcggggcgggtttaagggtgatatttgcgttttaaagggttcgggttagttgattttcgattttgtggagtttagttgttagggtcgcggtagttgcggggagagatgattggggagcgatttagtacggcgttttcggatagacgttgggggtcgcggattttgggtttttggggaggttgtagggtttgggtgtttgtcgcgatttttttgttgttgtttttggtagttttttggtttaaggttgagaacgatttcggtttggtgagttattttttgtatagttttattttcgattcgcgtaggtgatcgatatttagtgtttttcggaacgcgggcggttgagtcgatttttcgcgataggattttttttttttttttagatttcgtttttttttatcgtttttagttttttttttttttcgggttttcgtttttttttttattcgagttttttttttttttggggtttttttttttttttgaaggcgtttttttttttcgtagatttttttttgtttcgagtttttagtttcgttttaaattttttttcgtgttttttttttttgttttgggattttattttttattcgggatttttattagatttttttttttttatcggaacgtgggtttttaaaatttttaagataagtttgtttttgttgattttttttttttttatgataggtgtagtcgttggtgattatggagtaattgttgtgggtgagcgggagatagatcggtttagtggatatttttcgtatttcgtttattatagttatttcgcggggtatttttttcgtttttgttgaggcgaggaaaatgtttttattcgatgagggggttaagtttatcgttttgcggaggtttatggattagggtataaagatgtttgggtgaaagagtcggtgttaggttggatgggtgggtagtttaatgagtttaagggttttgaggataggggaatttagagggttggttgtttgagtttttgaggggtagagggaattcgagaagggtaagtgtttaggatagtgatttggaaattgggattattaaggagttggatatttatttagtaaatatttattgggtattatatatttatattaggtattattttaggttttatgaatatagttacgaataaaatagattaaaaatttttgtttttaggatttaaattgtattggaaggagatagataagtataataaataagtaaatttttttgtttgttgtaaggtgataaatgtaatggagaaaaataaaataggataagaggtatagatagtgtaagtgttggattgtattttgggattatcggaaggtttgaggtttttagtagaaggtgggaaattaacgggaagtggtagaaagggtatttgtagagtgtttattttgggtttttttttttaattttttttaggtagtatatggttttttatagcgtttattgttaatgatggggatgttttcgatgggttgaattttggggtagtagtgagcgatgttgagataggagtagtattttttttttattttttttgtgtttataaggtcggttgttaggtggtttttattatgttggtatggagtaaggatgatggtgttttttggagtatatttcggaatttttttttggatattggtattgaagtgtttgtttttggatcgggttttggtatttaggtttttgttttaggagataggtggagggggttgttttgtggagagtttgagggatatttttaaatggatttttttttaaggggaagattttttgaagttagattttttggtttgggtgggattttttgaaagatagggtattttggtaggaatatattattaggagaagagggaattttgttattggttttttatttggtattgttaataggattgcgttagtttatgtaatatttttatgtaaagtagaaaaaggtattgtttttttggatagatataagtttgtgttagggtgtatagtttggcgagtgagtataggttgggtttaagtttttatgtattttgtggttgggtttttggtgtatatgtttagttgtatattttgggagagttttttaatttaaatagggtgtgtatttatgggatttgattggaatttttagtgagtaagggttgaatttaaggggattatatatgtgattgtatttgggaagtggtgggttttttgtttttgtttttgagtttttagagtttttttttgtgatatttagtttttttttttatagaaatagcgggagttacggaagggtcgttttatcgtgtgtggttatgggacgttggagcgggacggagttttttgtttttttagcgatgattatggtgttttttggcgttacggaagtggggttagcggtattttttacggttagtttaagtaggaaaatgattttaattttgatgaatgttaggttaggagttt

SEQ ID NO: 111 - DNA, 3001 bp, Artificial Sequence
  chemically treated genomic DNA (Homo sapiens)
ttttcgtttgattgggtgggtagagggagggtcggtatcgttgatggttttgttgcggttggagcgttttattaggatgtttagatgggttttgattgcggcgatgtcggttagtttattttgcgggttaaagcgggtaaagttattaaatttaggtagacgttatacggtttcgtttttttttaggtttatagagaatagttgttttttattaaatttatgggtgaattggttcgaggcgtcgtaagattggtagaaggcgggttcgtaggagtttatgtggttagttgtgtttggcgagtttagggttaaggagagagaaaaaaatgtgtttgttttatttataatatgtgattgttgagtttttgagtttgggtttcgttttgggttttgtgtggggatagagttttgttttgatattgggttggttttgggagagagaaagggagagagaataggaagaaagaggtttattttagtatattgtagtcggtatagagatagtgtagtttggtatattaggatgggaagaggagggattgtttaaaattatgtttggggttttagaatttaaattttggttgtggttatttgttttggttgtgttgttaggttttgtgttgtgagttggtgggattgtgggggtgggatgaggaggaatgattaaggataggagagtatggagttttgtatagagatgtagtgtaggtgggtgtgaggggaaataggttacggttggtaggggtaagaattaaggttagtgatttagagattaaggggatagggagaggtaatttaaggtattataaagagtattggacgaggagttagaagttaaggtttatgttttaatttttttattttagagtattatgattgagtgtggtttttttataattgttgtttagttttttggaagttagggattaagttttaatttttgtagaattttatgaagttgtttgagtaatagttattgaggaattagtatgtatttagtataatggggggttagggaaataaaagaaaaaaaagatgaattatttgtagattcgtattttagtttatgtttttcgaagaataaagataggtaaatagttaattatcggtatgggtataaatattgtaatagaattggatttgatcgggtatattttaggttaggggtggtagagaaattagggtgtttgttggtatttgttgggtggaggtttgggttttaggaaggaggaaggaatgaggagaaatttgaacgttagtaaaggttgattggggtatttgcgtagttgatcgagttgtatttttatttaggtttagagtggatgtgatagagatgagggggattgggtgttttttggtgaaggaagttgtttataaattagagagcgagaggaataagtattttttatgttatttttttatgtaatttaatttcgtaaatttttgtttttcgtcgtatttttttcgttttcgtatttatttttggtggtttttgttttttgcgggtttaggagggttattagggtgtggaattttaggattagttttgttttgagggttattatattttggtgttttaattaaattagttttagttcgtgtggtgaggataggaataaggcggaggtaaagaagaagaaaatagattcgaggatgggggcgattttttttgtttttagttaattatagaaattttttgagtgaatgtatttgttgttgggtaaagagggaaagagtcggggtgagaaggtggaaggatttattgggtttttaggagaggttaaaggaagttttggaggatgggaggggtttggattaattattattacgttttttaagaagggattttttgaagagagagaaaaggtcgttagagtatcgcgtagttgagttttaataaattttttttttatgtttatttgcgatgtagggaattttatttttttaagaagttttcgtggataaattttgagttagaaagtaaaataaattttattaataatttttaaaaggaaaatattggttatataatggaataaaaattttttaaaattttaaattatttttaaaaatgttattttattttttttttattattatttaattttattgtgtaagaaaaaatgtgtaattgttggagttgtttggtttaaagtaaagtgtaaagagttttcgtggatttttcgaggagggtagaggtgttggttttttttgttggtttttttaggattcgggtattttttttaggttgatataggttggaggacggtattatttttgtttttggtttttggttgggttcggttaataagaggtattgggagaatttagtttagtatatatatttaaaaaataaaataaaataaaataataataacgtaaagttaacgtttgtgtaaagagaaatttaattaaattaggttatgtgttaaagattatgaaatcgatgatttttaatttggagggagttaggaaattatgcgggtttttggttttaaatgagaattatttggggggttcgttataatacgtgtttttgagttttttttttatttaatgggttagattagtttttttaaggtagggttagggaatttgtgtttttagtatgttttttaggtggttttcgggtagtttgtggattggtaaaatttgttttaatgttttttttttaatgaataagggatgtttattttaagtggggtagatatagtttttgattttaaattaattaaatgatagttagtaattgatttgtatggttcggtttatggggagttttaattttagttttttcgtttttagtttatagtgtttacgtaatgtttagtatattataggcgtttaggagatatttgcgtatgaatgaatagtgtttttattgttttggttttgttttggttaggatttttgttatttttatttttttttaagtgaggtgggagttggagttatgagatgaaagacgggaaagttatgaaaaatttatgataaagaatgt

SEQ ID NO: 112 - DNA, 3001 bp, Artificial Sequence
  chemically treated genomic DNA (Homo sapiens)
atattttttattatgagttttttatggttttttcgttttttattttatggttttagtttttattttatttggggggaggtgaaggtggtaagggttttaattagggtaggattaaagtagtgaagatattgtttatttatgcgtaggtgttttttaggcgtttatgatgtgttaggtattacgtagatattgtggattagaaacgaaaaaattaagattagggttttttataaatcgggttatgtaaattaattattagttgttatttgattaatttgaagttagaagttgtgtttgttttatttaaaataggtattttttatttattgaggaaagagtattggagtaggttttattagtttatagattattcgagaattatttggggagtatgttgaaaatataggttttttggttttgttttggaaaggttaatttaatttattaagtaaagaggaaatttaggaatacgtattataacgaattttttaggtgatttttatttggaattagagattcgtatgattttttagttttttttaagttgaaaattatcgattttatggtttttgatatatggtttaatttggttagatttttttttatatagacgttagttttacgttgttgttgttttgttttgttttgttttttaaatatatatattggattaaatttttttagtgttttttattagtcgagtttaattagaagttaaaggtaagggtgatgtcgttttttagtttgtgttagtttggaggaggtgttcgggttttggagggattaatagagaggattagtatttttgtttttttcggggagtttacgggagttttttatattttgttttagattaaataattttaataattatatatttttttttatataatgaaattaaataataataaaagaaaaataaaataatatttttgaaagtgatttaaagttttaagaggtttttattttattgtgtagttaatgttttttttttaaagattattggtaaagtttattttattttttaatttaaaatttgtttacggaaattttttgggaaagtaggattttttgtatcgtagatggatatagagagaggatttgttggagtttagttgcgcggtgttttgacggttttttttttttttttagggggtttttttttggaggacgtggtaatagttggtttaagttttttttattttttaaaattttttttggttttttttgggggtttagtgaatttttttatttttttatttcggttttttttttttttatttagtaatagatatatttatttagagaatttttgtgattggttgaagatagaaggggtcgtttttattttcgaatttgttttttttttttttattttcgttttgtttttgtttttattatacggattgagattgatttgattaaagtattagagtgtaatggtttttagagtagggttggttttggggttttatattttgatgatttttttgagttcgtaggaggtaggggttattaagggtgagtgcgagggcgaggagggtgcggcggggagtagagatttacggagttgggttatatgaggaggtggtatggaggatgtttgtttttttcgttttttggtttatgggtaattttttttattaagagatatttaattttttttatttttgttatatttattttggatttaaatgaagatgtagttcggttagttgcgtaggtgttttagttagtttttgttgacgtttagatttttttttattttttttttttttttgagatttaaatttttatttaatagatgttagtaagtattttgatttttttattatttttggtttggaatgtgttcgattaagtttagttttgttgtagtatttatgtttatgtcggtagttaattatttatttgtttttgtttttcgggagatatgagttggggtgcgggtttatagatggtttatttttttttttttttatttttttggttttttattgtgttgggtgtatgttagttttttaataattgttgtttaaataattttatagagttttataagaattaaaatttaatttttaatttttagaaaattagataatagttatggaagagttatatttagttataatgttttgagatggaggaattgggatatgaattttgatttttgatttttcgtttagtgttttttgtaatgttttgagttgtttttttttatttttttggtttttgggttattaattttaatttttatttttgttagtcgtggtttgtttttttttatatttatttgtattgtatttttgtgtaaagttttatatttttttgtttttaattatttttttttattttatttttatagttttattagtttataatatagggtttgataatatagttagggtagatgattatagttaagatttaaattttggaattttaagtatgattttaggtagttttttttttttttattttgatatgttagattgtattgtttttgtgtcgattgtagtgtgttgggatgagtttttttttttttgtttttttttttttttttttttttagggttagtttagtgttagaataggattttgtttttatatagaatttaggacggggtttaggtttagggatttaataattatatattgtggatgagatagatatatttttttttttttttttgattttgaattcgttaaatatagttgattatatgggtttttacggattcgttttttattagttttacggcgtttcgggttagtttatttatgaatttgatgaggaatagttgttttttgtggatttgaagaaaagcgaggtcgtgtggcgtttgtttgagtttggtgattttgttcgttttgattcgtagggtgggttggtcggtatcgtcgtaattaaagtttatttggatattttggtggagcgttttaatcgtagtagagttattaacggtatcggttttttttttgtttatttagttaggcgggaa

SEQ ID NO: 113 - DNA, 6944 bp, Artificial Sequence
  chemically treated genomic DNA (Homo sapiens)
gaagttttataagatcgaagtggagttattggagtgttttaggtgaagaaacgatatattttgatttatagtagtaggattattgtggagagaatatttaggtggtaggtaatggaatagtgttagagttattatttaggagtgatagagtggtggggattaagggaagaggagggtttgagggatgagagggacggagggaagggttggagaagtaggaggtgaggagaaggagtagagggatagaatttgaaagtagtagaatttttagttttaaatatattgttttataaatttttaatatatttatttatagagtttagtagggtgttttttgtatttggtttttaatattttatgtgggattgtttaaaaattaattgttttttttgtttttttttaggtttaaaaaaatattaagtgttttaataaaatatgtatattatttagatgcggatattttttaaaaataggaagtgtatgagtattggtgaggggtattgtgattgcgttgaatatttgtaattttgaggtgaatgaatgtattggtttttggttgtaatatataattatacgttgtgttattttgtattgttaggagatgttttggatttttatagaaatttagggttatggaatgaaggtaattttagaatataataagagttatagatatatagtttgggaaagtaaaatttaggagttttgagagttgtataattgtaatgtatttagatatatttatatattaaggggttaaagtaatagtttttatatataagatttttgattggtcgggcgcggtggtttatgtttgtaatcgtagtattttgggaggtcgaggcgggaggattacgaggttaggagatcgagattattttggttaatacggtgaaattcgtttttataaaaaaattagtcgggcgtggtggcgggtatttgtagttttagttattcgggaggttgaagtagaagaatggcgtgaattcgggacgtagagtttgtagtgagtcgagatcgcgttattgtattttagtttgggcggtagagagagatttcgttttaaaaaaaaaaaaaaaaaaaaaaaaaaaaaaaaaaaaaaaaaaaaggtttttgataatttaggggttattaagattttattatttattgtagttaataaaaaaaaaaaagaaagaaagaaattggtttttgttttattttatatgtttaggtataatttttttagagaagaagaggaggggggcggggaggagtaggaggaggaggaaagaaggaggagaaggagaaggagaaggagaaggagaggaagaggaagaggaagaggaagaggaagaagaagaagaagaagaagaagaagaagaagaagaagaagaagaagaagaagaagaagaagaagaagaagaagaagaagaagaagaagaagaaaaggaagaagaagaaattgtttttatatttttatttttaggataagtttattgtttggtattaagttttttggggtgaatttttttttaaaagagttcggggagtttaggtatggaatgggaggtagaaagtttaattaagggattgggatttcggaatgaataatgaagggagatggattgggtttatgtcgaaggtttttttttggttttttagttttcgggcgaagatttagggagatattgagatatattttgtataggagggggagggggagggggagggtaaagttttagggttttaggagtggtttttaagggtttaggtttcgaggcggtgtttggggttgggaggtttagtattgagaattttttatttttttagagttttttttttttttttaattcgtgttaggtttttttttttggatatttataacgcggttttattttttatttttattgggcgtcgcgtttttagagaagttaattagtgtcgtcgtagtttttaggttttaaagttttacgtatttcgcgggatttatattttttttagacgcggaggttggggttatggcgtttcgaagtttttttttgttgtttttaggggttttggttttgatcgatatttgggcgggtgagtgcggggtttagagagaaacggtttttgtggggaggagtgaggggttcgttcggtgggggcgtaggatttagggagtcgttttcggaggagggtttggcgggttttagttttttttcgtttttaggtttttattttttgaggtattttagtatcgttgtgtcgcggttcggtcgcggggagtttcgttatatcgtcgtggagtacgtagacgatacgtaatttttgcggttcgatagcgacgtcgcgatttcgaggatggagtcgcgggagtcgtgggtggagtaagaggggtcgtagtattgggagtggattatagggtacgttaaggttaacgtatagattgatcgagtggttttgaggaatttgtttcgtcgttataattagagcgaggttggtgagtgaattcggtcgggggcgtaggttacgattattttttattcgttacggatcgttcgggttttttagagttttcggattcgaaatttatttcgaggtagcgggattcgtttagattttttattcgggagagttttaggcgtttttatttaggtttatttttagtttaggttaaaattttcgcgggttgggcggggagggggcggggttagttgggcggggttgattgcggggatcggttagggttttatattttttagggaatgaatggttgcgatatggggttcgacggacgtttttttcgcgggtattattagtacgcgtacgacggtaaggattatatttttttgaacgaggatttgcgtttttggatcgcggcggatatcgtggtttagattatttagcgtttttatgaggtagaggaatatgtagaggagtttaggatttatttggagggcgagtgtttggagttgtttcgtagatatttggagaatgggaaggagacgttatagcgcgtaggtattaggggttatgggcgttttttttattttttgtagattttttgggatggtttcgtataaggttgggaggaaagtggatttaatgttaggatatcgttttttttttagttttgagtaggaagaatttttttggttttcgagattcggtattagagagtgattgtgagagttcgttttgttttttgggataattaagggatgaaatttttgagggaatggagggaagatagtttttggaatatcgattcgcggttttttttgagttttttaatagttttgggtttcgtgattttttttttaagttttgttttttgttttatatttaatgtgtttgaggttttgattttagtttttcggtttttatttaggttagggttagaagtttttgttttttttttagagattttaattttttaaggaataggagatttttttaggtgtttgtgtttaggttggtgtttgggttttgtgtttttttttttattttaggtgttttgtttatttttaggttggttatatgggtgttgttggggttttttatgaggagtgtaaagtgtttgaattttttgattttttttagattttttaaaggtatacgttgtttattattttatttttgattatgaggttattttgaggtgttgggttttgggtttttattttgcggagattacgttgatttggtagcgggatggggaggaatagatttaggatatagagtttgtggagattaggtttgtaggggatggaattttttagaagtgggtcgttgtggtggtgttttttggagaggaatagagatatatatgttatgtgtagtacgaggggttgttttagttttttattttgagatggggtaaggagggagatgggtaaagaggggaacgaggggttatgtttttttttagggaaagtaggagtttttttggagttttttagtagggttagggttgaggtttggagattagggttttttatttttttttttttttttagagtagtttttttagtttattatttttatcgtgggtatcgttgttggttttgttgtttttggagttgtggttattggagttgtggtcgttgttgtgatgtggaggaagaagagtttaggtaggaaggggtgaggagtggagtttgagtttttttgttttattgggggttgtaagttttaagtagaagtgtgttttgttttattattgggaagtattatttatatttatgggtttatttagtttgggttttgtgtgttagtatttatttatttgtaaagtttttgtgaaaatgaaggatagattttttatttcgatgattatggtggtgatgggatttgattttagtagttataaattataggggaaggtttttgttgatgatagattttaggagggtagttggtttaggatttatatttgttttttttatattttttgattttgttttggatttatagttatatttttttggaaatttttttgggattaaagattaggggtttgttttaggattttatggttttgttttttttttggttttttataggatattttttttttatagatagaaatagagggagttatttttaggttgtaggtaagatgaaggaggttgatttttgagattgttgggatattgtggttaggagtttatgagggagtttatttattttatagtttttttagttatatttgtgggttttgattaggttttgtttttgttttattttaattattgatagtgtttagggttttggggtgttttttatagttaataaaggtgatattttagggtaggggttttgatgtgagtggggtgttgggggggaatagaggggatttagttgtgttattgggtttttttgatttggatgttttgagtatgaaatgggttatttagagtgttattttttattgtgattgatacgaatttgtttatgaatattttttttatagtgtgagatagtttttttgtgtgggattgagaagtaagatattaatgtagtagaattgtatttgtgttttacgaatatatataaattttaaaaataaagaataaaaatatatttttttatagatataggtagatatgtttttatagtatgtacgtaaatgtgtgtgtgtgtgtgtgtgtgtgaagagaaagagtgaatagagagattaagatttttttaatggtgaaaagatatatatatatttggaattagttagtttgatttagtttaggtgattttaattttggtggtaataattaaagtatcgtagttaggagttagtcgaatatatgtttttttttttttattagattgaattagagtgttgattttggttatattaatgttataaatttttttatagtttgtttgatttggtgtttgttggttttaatatttatagtgaatataagtaggttgttgttttttattttttttatagtttatttagtggttagcggaaatttgatgataatatggtggttaagtttattttttttgggggtgtttttttaaggatatttgggttgttttcggagttatagtgttttgggtcgtcggaaggtgggtgatatgtggattttgttttttttgtggttgtggatattttttaatattgtttttttggttttgtaaagttttcgttttggtttcggttttaggaggggtaggagttttttttttcgtttttggtattattttatgaaaagggtttagattaagatttttgattgagttattttaaagtaagttgtaagatttatgatattagattattaaatattttattatatattttttaagaataagaattaatattattatattaaagaaaataaataattttataatattatttaaagtttttttatgtttaaatatttttattttttttagtatatttttgtatttattttttatagtttgtttttttaaaatgtttattcgttgtttttggttatgtttttttaattatttataatttataataattaatttatttttttttttttagaatggtattatttgttttagagatgaggttaaatatttgtggaattttttttatattgaatttattatattattttttttgatgtttttaattttttttttttaattgttatgttttttaaggatttatgtagttttgggttaaatatttggtagtaatgtttataggaggagttgtgatcgtatatttattatattaggaggtatataaagtttagggttattaggattttttttgattttatatagttaaatttattttgattttttagagatgtagaattatgggttgggtgtttagtgggtatgagtgtgatattttggtaataggaggttttgttattttttttattttttacgagttttagttttttatattttgaggttttgagttttagatttttaattattaggttaggtttttttagatttagattttttttttgttttttttagttttattttgttttgtatttattttcggattattttttttttataggtttagtttttgagtgtttttattttttaaataagtatttttatttaggagtaatttttttattagaggatattagttatgtttggaaaaatgttttgttgttatgattggagtgaggaggaggtgttattagtattttgtggggaatgattagggatgttgaatattttgtagtgtataagttagtttaattatttatataatagataattatttagttttaatattaagattgttaagggtaaggaggtttgttaggatttttttttttttgagtataagtttttttgaattgagggatattttgaaggaaaagtgtggttttattttagttattttttttttttttggagttttatttgtatgtttgtagtgtttaggtttgtaatttggggtttaggaatttatttttttatgagattgtatgtagaagtgatgatatgtgtatata

SEQ ID NO: 114 - DNA, 6944 bp, Artificial Sequence
  chemically treated genomic DNA (Homo sapiens)
tgtgtgtatatattattatttttgtatgtagttttatgggaaggtgggtttttggattttaggttataggtttaagtattataggtatatagatggagttttagggaagggagagatgattggggtgggattatattttttttttagggtgttttttagtttaaggaagtttgtatttaagggagagaaagttttggtaggtttttttatttttggtaattttggtattggggttggataattatttgttatgtgggtgattgggttgatttgtgtattgtaggatgtttagtatttttggttattttttataagatgttggtagtattttttttttattttagttatggtaataaaatatttttttagatatagttaatgttttttggtgggaaaattgtttttggatgagaatatttgtttgagaggtagagatatttaggagttgggtttgtagagggaaagtgattcggaagtagatataaagtagagtggggttggagaagataggaagggagtttaggtttggaggggtttggtttgatggttgaaggtttggagtttagaattttagggtatggggaattaaagttcgtgaggaatggggagagtggtagaattttttattgttagaatattatatttatatttattaaatatttagtttatggttttgtatttttgggaagttaggataaatttggttgtatggggttagaaagagttttggtaattttaggttttgtgtgttttttgatgtgatgaatgtgcggttatagttttttttgtaaatattgttgttaaatgtttaatttagagttatataggtttttaggaggtatagtagttagaggaaaaaagttaaaggtattaggggaaataatatgataaatttagtgtggagaagattttataggtatttggttttatttttgaaataggtaatgttattttaaaagaaaaaagatgggttgattgttatagattgtaggtaattaaagaaatataattaaaggtaacgagtggatattttaagaaaataagttataaaaaataggtataaaaatgtattgaaagaagtggagatatttgaatataaaaggattttaaataatattatggaattatttattttttttggtgtgataatgttggtttttatttttaggaggtgtgtgatgaagtatttagtggtttagtattatgggttttgtaatttattttagaatgatttagttaaaaattttaatttggattttttttataagatggtgttaagaacgaagaaggaagtttttgttttttttaaagtcgaagttaaagcgaaggttttgtaaggttaagaaggtagtgttgaaagatgtttatagttataaaaaaaataagatttatatgttatttatttttcggcggtttaagatattgtgatttcggaggtagtttaaatatttttggaagagtatttttaggagaaataagtttgattattatgttattattaagttttcgttgattattgagtaggttgtgaagaagatagaaaataatagtttatttgtgtttattgtggatgttaaagttaataagtattagattaaataggttgtgaagaagtttgtgatattgatgtggttaaagttaatattttgatttagtttgatggagagaggaaggtatatgttcgattggtttttgattacgatgttttggttgttgttattaaaattgggattatttaaattgagttaagttggttagttttaaatatatgtatatttttttattattaaaagaattttaatttttttatttattttttttttttatatatatatatatatatatatatttacgtgtatgttataaaaatatatttatttgtatttataaaaagatatatttttattttttatttttaaaatttatgtatgttcgtgaggtataagtgtaattttgttatattgatattttgttttttagttttatataaggaagttgttttatattatagagaaaatatttatgaataaattcgtattagttatagtgagaggtaatattttaaatagtttattttatgtttaagatatttaagttaaagaaatttaatagtatagttgagttttttttgtttttttttaatattttatttatattagggtttttgttttggagtgttatttttattagttgtgagagatattttagagttttgggtattgttagtgattggggtagaataaaaataggatttggttagagtttatagatgtggttagaggaattgtggggtgggtgagtttttttataggtttttgattataatattttaataattttagggattagttttttttattttatttgtagtttgagagtagttttttttgtttttatttatgggaagaaaatgttttgtgagaggttagaaaggaggtagggttataaggttttagagtaaatttttagtttttgattttagagaagtttttagaaaagtgtaattgtagatttagggtaggattaagaaatatgaagaaagtagatgtgggttttggattaattgtttttttgaggtttgttattagtagggatttttttttgtgatttgtgattgttgggattaggttttattattattataattatcgaagtgaagaatttgttttttatttttataggagttttataaatgagtaggtgttggtatatagggtttaggttgggtagatttatgagtgtggatggtgttttttagtaatgaggtagggtatatttttatttggggtttgtaatttttagtgggataagaaaatttagattttattttttatttttttttatttgagtttttttttttttatattatagtagcgattatagttttagtgattatagttttaaggataataaggttagtaacgatgtttacgatggggatggtgggttggggagattgttttgggaaaggaagggaaggtgaggggttttgatttttaggttttagttttgattttgttgaagagttttagaagggtttttgttttttttgagaaaagatatgatttttcgtttttttttttatttatttttttttttattttattttaggatgaggggttggggtagtttttcgtgttgtatatggtatgtgtatttttgtttttttttaggaggtattattatagcggtttatttttggaaggttttattttttgtaggtttggtttttataagttttgtgttttgggtttgtttttttttatttcgttgttaggttagcgtgattttcgtagggtagaagtttagggtttagtattttagggtggttttatggttagagatggggtggtgggtaacgtgtgtttttggaggatttgagaagagttagaaaatttaggtattttgtattttttatgggaaattttagtagtatttatgtgattaatttgagaatggataggatatttggggtggggaagggagtatagaatttagatattagtttggatatagatatttgggaaaattttttattttttggaaagttagagtttttgaggggggagtagggatttttggttttgatttaagtggaggtcgagggattggaattagagttttaaatatattgagtgtgaggtagagaataaaatttgagagaaaagttacggggtttaaggttgttggagggtttaaaggggatcgcggatcggtattttagggattgttttttttttatttttttagaaattttattttttaattgttttagagagtagggcggatttttatagttattttttggtatcggatttcgaaagttaggaagattttttttatttaggattagagggagggcgatattttagtattgggtttattttttttttaattttgtgcgaggttattttaagagatttataggagatagggaaggcgtttatggtttttggtatttgcgcgttgtagcgttttttttttattttttaagtatttgcggagtaattttaggtattcgttttttaggtaggttttgaatttttttgtatatttttttgttttatagaagcgttgggtgatttgagttacggtgttcgtcgcggtttaggagcgtaggttttcgtttagggagatgtaatttttgtcgtcgtacgcgtgttggtgatattcgcggaggaggcgttcgtcgggttttatgtcgtagttatttattttttggagggtgtgagattttagtcggttttcgtagttagtttcgtttagttagtttcgtttttttttcgtttaattcgcggggattttggtttaaattgaaaatgaatttgggtaaaggcgtttgggattttttcgggtggagggtttgggcgggtttcgttgtttcggggtagatttcggattcggagattttgagggattcgggcggttcgtggcggatggggggtggtcgtgatttgcgttttcggtcgggtttatttattagtttcgttttggttgtagcggcggagtaggttttttagggttattcggttagtttgtgcgttggttttggcgtattttgtggtttatttttaatattgcggttttttttgttttatttacggttttcgcggttttattttcggaatcgcggcgtcgttgtcgaatcgtaggaattgcgtgtcgtttacgtattttacggcgatgtagcggggtttttcgcggtcgggtcgcgatatagcggtgttgaaatattttaaggagtgggagtttgggggcgaggaggggttgagattcgttagattttttttcggaggcggttttttgagttttgcgtttttatcgggcgggttttttatttttttttatagaggtcgtttttttttggatttcgtatttattcgtttaagtatcggttagggttagggtttttgagagtagtaggaggaggtttcggggcgttatgattttaattttcgcgtttgggaaaaatatgagtttcgcggggtgcgtgggattttagaatttgggaattgcggcgatattgattggtttttttagaaacgcgacgtttaatgggagtgagaaatggggtcgcgttatgagtatttaggaagaaggatttgatacgggttgggagagaaagagaaattttggggagatggggaatttttaatattgagttttttaattttagatatcgtttcggggtttgagtttttgagagttatttttggggttttgggattttgtttttttttttttttttttttttttgtgtagggtgtgttttaatgtttttttgagttttcgttcgggggttgagaaattagggagaaattttcggtatggatttagtttatttttttttattatttatttcgaaattttagttttttgattgaattttttgttttttattttatatttggatttttcggatttttttggaagaaaatttattttaaggagtttggtgttagataatgaatttgttttgagaatgaaggtgtagagatagtttttttttttttttttttttttttttttttttttttttttttttttttttttttttttttttttttttttttttttttttttttttttttttttttttttttttttttttttttttttttttttttttttttttttttttttttttttttttttttttttttttttttttttttttttttttttttgttttttttcgttttttttttttttttttttggaaaagttgtatttgagtatatgaaataggatagagattagttttttttttttttttttttttttattagttgtagtgagtagtagaattttggtaatttttgaattattaggaattttttttttttttttttttttttttttttttttttttttttttttgagacggagtttttttttgtcgtttaggttggagtgtagtggcgcgatttcggtttattgtaagttttgcgtttcgggtttacgttatttttttgttttagtttttcgagtagttgagattatagatgttcgttattacgttcggttaatttttttgtagagacgggttttatcgtgttagttaggatggtttcgattttttgatttcgtgattttttcgtttcggttttttaaagtgttgcgattataggtatgagttatcgcgttcgattaattaggaattttatgtgtaaaaattgttattttggttttttgatatataaatgtgtttaaatgtattatagttgtataatttttagagtttttaagttttgtttttttagattatgtatttgtgatttttgttgtattttaaaattatttttattttatagttttgagtttttgtgggagtttaggatattttttgataatataaagtagtataacgtgtgattgtatattgtaattaggagttaatatatttatttattttaaagttgtaagtgtttaacgtagttataatgttttttattagtgtttatgtattttttgtttttaggaagtattcgtatttaagtggtgtgtatgttttattggaatatttagtatttttttaaatttgaaaaaaagtagaaaaagtaattaatttttaggtagttttatataaggtgttaaaggttaaatgtaaggaatattttgttaggttttgtagatggatgtattaaaaatttataaaataatgtgtttaaagttaagaattttgttgtttttaaattttgtttttttgttttttttttttattttttgtttttttagttttttttttcgttttttttattttttaggtttttttttttttttagtttttattattttgttatttttgaatagtggttttagtattgttttattatttgttatttgagtgttttttttatagtggttttgttattgtgagttaaagtgtgtcgtttttttatttaaaatattttagtggttttatttcggttttgtgaagtttt

SEQ ID NO: 115 - DNA, 3001 bp, Artificial Sequence
  chemically treated genomic DNA (Homo sapiens)
ttattttattagataaggttgttaaattaaggttttgaggtttttttatagataatgtgaagttatttatggtttttgagaaatagagggagtagaattttgtgtttttaatggattatttgaataggagtgaagaagtttgtttaaaaaaaaagattgagaaatttgttgagagattattataatggtttatatgaatgttaataaagttttgttcgggggaatgtatagtgaagaataaataggaaaaattattttaaaagaagaaataataagatttggtaaaggtttgattatgtaaatagtggggaagttagagttttgagtttaaatatgtggtagaattggtgtagttaattttatttggaagattaagaatagaaagatgatagttttaatattgagtatttgaagttttttagtataatattggatagaattggaaaaaataaatttggggattattagtttttaagcggtattaaaagttatgggaaaggaagataatttatggtaaattgtatagaaaagatagaaggtttatattaaggtttgggaaagtttatttttcgaagttatattgtgaggtgatatgtttttaggtatgggttagaaaaatttttttattcgtttatatttattttatatttttttagagtgtagagtttgtgaaaggttaggttatgtttatatatagttttttattttttttttgagtttgttgaattttttttgtagagttttttttttttcgtttagttcggggggtattattaatatggtggtttttagtttaggggtagggtttaagatatttttttttattgttattattcggggtttatacgtcgtttatattgtatttaattttatttttttaggtttgtttatttttgtttttggttttttttattttttgtttaaattaggttgttgtttaagttttcgttggtcgggattatttagtatttttttttgtttttagggattatagatattagtatttttaggtattatgtggtttaaggagggataaatatttatttcgtcggaaagacgatggtattcgatttttttattttcgttagggtaaggataatcgcggggtttgaacggtagagaaggcggtggagttagcgtagcgttcgtagagtaacgtaaagaggaagaatagagaaacggttatgagaaaaagggtcgaagagtgagaagtagagggttttattcgagggggcggtaatcgggggttttacggttttcggtcgcgttcgcgttggtcgttgatagcgggtttataacgatgacgtagcgaggagcggaaaacgcggtaattaaggcggttttaggcgcgtattttcgttcggttttttatcggtttaggtttgttttttcgtagcgatagtttacgttttcggcggggttgtatcggaagttgtttttattttcgttcgtttcggggcggggtttatttcgtagcgattatttgtcgtattttcgggttgttaggtagttgttgtggttttaggatgatggagatagagcgatttggtgagggggaggggagggaaatggaacggagtagtcgatatggaatgaattttgatttttgatttttgattttttttcgtagtgttattttttttagattttttggatttattttttcgggtcgtggagttcggatgtacggggtattgggagttgttgaatttgtttggagttttagagagtagcgtgagtgatttttgattttaatttttgattcgtattgagtttaaattttttttattttttttatagtaggatttagtttaattttgtttatttgtgtttgtatttttgtttattttagtttgaaggggtgttggatagattatagtttagtgtatttgtagtacgtgtgaggatagagtagaaagggttggggatatttttgttttgagagttgtttttttaaatgtggtattttttcgtggagtttttttttgtatttaagtattagggtatttggtgattgagatgataggttttgagtttttaattttttatttttaggtttgggatttttttttttaaaattagtgagtttttaattttagtgtgttttatgattagttagggagttttttaaaaatgtatatttttaggtttagtttttatgtttttgaaatttaaaatttgttttaggtaatttagtagtaggtagtttttggttaagtttgattgttttagtttgtttgatatatttgttatttttgatttgaatataagttttattattttttttgtttgtattttattttttttttttatttaatgttttttattttgtttttgttttagtttttttatggtttttttttttgtgttttagatttgtagtaagaagtagaatagttgtttttgttatttttagtttggttgtttttgtatggtgtggagtatttagttcggtgaggagtttggaggggtttagattagggtgatgggtttttgaaggaagttgggatagaggaagaaagaagatttaaaagttattatttttttttttagaaaatggtagaggaagacggatttttggttttttttggttgttttgggagttttagttttattcgatttataggtttaaagatatttaattataggttagatattgggttataaagaggtaggaggttaggggttatgagaaatagttggggagaaggggaggtggttagagataagtttagttttattggggttttgattttttgttttaggttttgttggagaatataaatttttcggttataatttttttgttttttcgtcggtttttagggttagttttttagtttttatggggaaatttaattcggtattttttttggttaggtgatttttgtggagatgggatggtagaagagggtgtttttaatttttagggaagggttttttatttatttcgtattatttttattttatgaatttttgtttgttttgtttttttttaggg

SEQ ID NO: 116 - DNA, 3001 bp, Artificial Sequence
  chemically treated genomic DNA (Homo sapiens)
ttttgggaagagataggatagatagggatttatgggatgagggtaatacgagataggtggggaatttttttttggagattaaagatatttttttttattattttatttttataagagttatttggttagaagggatatcgagttggatttttttataaggattgggaggttggttttggaggtcggcgaagagataaggaggttgtagtcgagagatttgtgttttttagtaagatttaaggtaagagattagagttttaatgaggttgagtttgtttttgattatttttttttttttttaattgttttttatgatttttgattttttatttttttgtaatttagtatttggtttgtggttgggtgtttttgggtttgtaggtcggatgggattggggtttttaggatagttaaaagagattagggattcgtttttttttgttattttttggagagaaaaatagtaatttttgggttttttttttttttttgttttagttttttttaggaatttattattttagtttaagtttttttagattttttatcgggttgagtgttttatattatgtagaggtagttaggttggggatgatagaaataattgttttgttttttgttgtagatttggggtataaggagggaggttatggggaagttgaaataagggtaagatgagaggtattaggtaaggaaagaggataaaatgtagataaaagagatgatgggatttgtgtttagattagaaatggtagatgtgttaaatagattaggataattaggtttggttaaaaattatttgttattgaattatttggggtagattttggattttagaaatatggaggttggatttaggaatgtgtatttttaaaaagttttttggttaattatgaagtatattgaaattggagatttattgattttagaaaaaggggttttagatttaaggatgaaaggttggaggtttaaagtttattattttagttattaagtgttttggtgtttggatatagaagggagttttacggagaaatgttatatttgaaagagtagtttttaaagtaaaaatatttttagttttttttgttttgtttttatacgtattgtaggtatattgggttgtaatttgtttagtatttttttaggttgggatggataggagtataggtatagatgaataaggttaagttagattttattgtgaggagggtgaaggaggtttggatttaatgcgggttaaaggttagggttaaaagttatttacgttattttttggagttttaggtaagtttagtagtttttagtgtttcgtgtattcgagttttacggttcgaaggggtaggtttaggggatttggagggggtagtattacggggaaaggttaaaagttaggggttaaagtttattttatatcggttatttcgttttatttttttttttttttttttattaagtcgttttgtttttattattttggagttatagtagttgtttggtagttcggaagtgcggtaagtagtcgttgcgaagtaagtttcgtttcggaacgggcggaagtagaggtaattttcggtatagtttcgtcgagagcgtgaattatcgttgcggaggggtagatttggatcggtggaaggtcgggcggaagtgcgcgtttggggtcgttttggttatcgcgtttttcgtttttcgttacgttatcgttgtgagttcgttattagcggttagcgcgggcgcggtcggagatcgtggggttttcggttgtcgttttttcgggtaaggttttttgttttttatttttcggtttttttttttatagtcgtttttttgttttttttttttgcgttgttttgcgggcgttacgttggttttatcgttttttttgtcgtttaaatttcgcggttgtttttattttagcgagggtaggggggtcgggtgttatcgttttttcgacggagtggatatttgtttttttttgaattatatggtatttaaaggtgttggtgtttgtgatttttggagataggagggaatgttggatgatttcgattagcgggagtttggatagtagtttggtttaagtaaggggtagggaaagttaaagataagagtaggtagatttgaaggggtggggttgggtatagtgtggacggcgtgtgaatttcgggtggtaatagtggagaaagatgttttgggttttgtttttgaattaggagttattatgttggtgatatttttcggattgagcgaggaagaggaggttttgtagaagaaatttaataagtttaagaaaaaggtgagggattgtgtgtggatatggtttaattttttatagattttgtattttgagaagatatggggtgagtgtgagcgaatggggaagtttttttggtttatatttagagatatattattttatagtgtagtttcgagaggtgggtttttttaagttttggtgtggattttttgttttttttatgtaatttgttatggattgttttttttttttatggtttttagtatcgtttaagagttgatgatttttaagtttgttttttttagttttatttagtgttatattgaaaaattttagatatttagtgttgaagttattatttttttatttttgattttttaaataagattgattatattaattttgttatatgtttggatttaaaattttgatttttttattatttgtatagttaaatttttgttaagttttattgtttttttttttgaagtaattttttttgtttattttttattgtgtattttttcgagtagggttttattgatatttatgtgggttattgtaatggttttttaataaattttttagtttttttttttgaatagatttttttatttttgtttaaatgatttattgaaaatataaaattttgttttttttgttttttaaaaattataaatggttttatattgtttataaaaaagttttaaaattttagtttggtagttttgtttagtaaagtag

SEQ ID NO: 117 - DNA, 8056 bp, Artificial Sequence
  chemically treated genomic DNA (Homo sapiens)
agtttgtttggtcgttttagggtttgttggaatttttttttcgtttatgtatttgtgaattattttacgtttgttattatcggttttttatagggtgatgtttattagtagtggtgataggttaatttttattattttttatgcggttgaatagttatttttgaattatttttttttttagtaattttttttttttcggattttttgtagttaatttgaaagaataataaggaggtggttggaaatttgttttaaggaatcgtttgtttttttttcgttggaaattttgtatttcggacgtttttgtttttgtttttatttgattttcgttttcgttgatatttaggcgcgatgatttttgttgttagtagagggtatatttattttattttcgtaaatttgaacgcgggtgttgtttagagagggggcggagggaaagacgttttgtagtaaaatttagtatagcgattggttgtttttcgcgtttgcggtaaaggtttggaggtaggagtaatttgtaatttttaaagttgaattgtgtagtgtatcggatttggaagttattatatttatttaatatttgaacgttgagttgtaaatttaacgggtaataatttattttgaatagcgtatatgttatatacgtatttttttttttcgaattgtttttttttttggaggtggtggagggagagaaaagtttatttaaaatgtttttgggtgagggattaaggatgagaagaatgttttttgttttttatgtcgtggaataatataaaataaaaaatttcgagggaatatatattatatattaaatatagattattttagggagtaaataaattatgtgtggggttgggtaattagttaagtcgaagcgtaaataaaatgtgaatatacgtttgcgggttatatatagtgtatttttattagtatttagaaaaaattgtgagttagtgaattaggaaattaatgtttggaaggtagttaaattttaattaatttaagatttttttttttttaaaaaaaggtacggaagtaatatttttttttttttttttgattagaatcgatgtattttttgtgtatgatcgtatttttaataataaaaggggaaagaggatttggaaaggaattaaacgttcggtttgttcggggaggaaagagttaacggttttttttataagggtttttgttgattttttcggttcggtttataagttttttatttgttttttttaggaagttcggtttcgcggttcgggtattttttgttttttttatattttttcgtttagtatttttgattttttttaaattcggtagttcgagattgttgtaaatcggcgttatagggcgtaaaggggatttgttttttttgaaatttggttgagaaattgggaatttcgtgtgggaggcgtgggggtgggacggtggggtatagattggtagagagtaggtaatttttttttcgttttagtttagttttggaataggtagatatattttagggttaaatagacgtttttcgtacggggttttacggaagtttgagtaggcggggtaggaggggcggtatttgttgttttggtagtaaattgggggatttagtttgggtggaaggtatttaatttagatagttgtgtatatataatgtataatatatgattttttttaataaatgtaatgggagtttatttataacgcgttttttaagtatacgtggtaatgcgttgttgggttattttaattattttaggtatcgtttttttttttatgtttttattatttttttttatttatattaatattttacgttttgaacgcgcgtttattaatattttttttttttttattttttttgggatttttgattaaagcgcggttttttttttagttttagcgaggcgttttgtagtttggtacgcgcgtggcgtggcggtgggcgcgtagtgcgttttcggtgtggagggtagttgtttcgtttgcgatgatttatatttataggataaggatgcggtttgttaaataatattgttacggaggagtagtagagaaagggagagggtttgagagggagtaaaagaaaatggtaggcgcgcgtagttaatttatgcggtttttttattttgtttatattttagagttagagtgttcggttgttcggttgagttttttttttattttttttattttttttattttttttataagcgtttttttcgggtttttaaagtagagggcgtgggggaaaagaaaaaagattttttttcgttaattttcgtttatcggttttttataatgcgagggtttggacggttgaggattttcgagttgtgttgttcgcggtcgttatcgtcgggtttcggtcgtttttggttttttttttgtttcgagaagggtagggttttttagaggtttggcgggaaaaagaacggagggagggatcgcgttgagtataaaagtcggttttcggggttttatttaattcgttgtagtaattttagtgagaggtagagggagcgagcgggcggtcggttagggtggaagagtcgggcgagtagagttgcgttgcgggcgttttgggaagggagattcggagcgaatagggggtttcgtttttggtttagatttttcgttgattttttaggtagcggttcgtaatttttgtcgtatttacgaaattttgtttatagtagcgggcggatattttgtattggaattgataatattcgattaaggacgcgattttttcgacgcggggaggttattttgtttatttggggatattttttcgtcgttgttaggattcgtttttttgaaaggttttttttgtagttgtttagatattgaatttttttcgggaagtggaaaattaggtaagtatcgaagtttatttgttttttaatttatttttttattagtttaattttgagatgagtcgaatgtttaaatagggtgtttttttttttaattttgcgttattgatatttttttcggggtgggggttattttagaattggatcggggtatagtgatttgttaagatgggggaggagaagatagagggaaaacgggaatggtttttacgattattttttcgagatttttgttttatgaatatatttacgtcgattttcggtcggtcggatatttttattttattgtgttaattgttttttgggttttggggggcggggggttgttttgcggtgggtagaaagttttttgtattttgagttttttggagaagggatcgtatatcgtttgtgtgagttagatcgtttcgtaggcgttgatttgttttcgttttcgggagggtagttaaatttcgatttatcgtatttttgatagtcggagacggatattgcggcgcgtttcgttcgtttgttttcgcggcgattttaattcgttttgatttttttaagaagttgatatttggttttttaaaaagtaataaaataatttaaaatttgggtttttagaagtgttaggacgtggtgttgggtaggcgtaggtaggggaaaagggaggcgaggatgtgttcgatttttttgtaatcgttgatttggaaaaattagggcgaattttcgtatttagttttgatttttttgtcgcggtcgttttcgggtgttttcgcgttcgagatgcggaggaattgcgaggagcggggttttgggcggttttaaaatagttgttatttttggtggggtggtttcgggggaggtatcgtagcggggtttttggcgtagttgtattttcgtattgagtgcgaagggaggtgtttttattattatttgatattttttttgtatttatggaggggtgttaaagttcgcggttgagttcgttattttagtcggcgagagaaagaagaaaagttggtaaaaggagtgttggacgggggtagtattgggggtggggacgggggcggtggagagggaaggttgggaggggttgcggtgtcggcgggggtaggagagcgtttagggcgcgagtgggaatagtcgtagcggaggggtttcggcgcggagcggggtttacgtagtcgttttcgtttaggcgtttttcgtttttttttttaggtggcgtaaaattttgtgttttggattttggtaaattgtattttttatcgttatttttcgcggttttttaagggcgttagggtcgatttcgatttttttgtcgttgcggggtcgattttcgggttttgcgtttcgggttttcgggggagcgggggttcggcgggtattaagacgttggtttattaagtgcgttttcgagatagtaggggattgtttaaagggggtgaaagggtgttttttttatttttttattaagattatttagtcgttttaggggatagttttgtaaggggagaggttcgggattgtggcgcgtattgcgcgttgcgttaggttttcgtattaagatttttttaatttaagattgtttttcgttttgtgtgtttcgttttagtagtttttcgcgacgatgttttttaacgttagttttattaataggaattatgatttcgattacgattcggtgtagtcgtatttttattgcgacgaggaggagaatttttattagtagtagtagtagagcgaattgtagttttcggcgtttagcgaggatatttggaagaaattcgagttgttgtttatttcgtttttgttttttagtcgtcgtttcgggttttgttcgtttttttacgttgcggttatattttttttttttcggggagataacgacggcggtggcgggagtttttttacggtcgattagttggagatggtgatcgagttgttgggaggagatatggtgaattagagttttatttgcgattcggacgacgagatttttattaaaaatattattatttaggattgtatgtggagcggtttttcggtcgtcgttaagttcgttttagagaagttggttttttattaggttgcgcgtaaagatagcggtagttcgaatttcgttcgcggttatagcgtttgttttatttttagtttgtatttgtaggatttgagcgtcgtcgttttagagtgtatcgatttttcggtggtttttttttatttttttaacgatagtagttcgtttaagttttgcgtttcgtaagattttagcgtttttttttcgttttcggattttttgtttttttcgacggagtttttttcgtagggtagtttcgagtttttggtgttttatgaggagatatcgtttattattagtagcgattttggtaagcgaagttcgtttaggtttgttaaaagtgggcggttggatattttttttatttttattggtagtttatttaacgggttatttttattaggaaggagagatagtagatttggagagatttgggagtttattatttttgaaattttgggttttagcgtttttttttattttttttttttagattgtttatgtttgtagttttttttttcgtttgttttttattttttaggaattttatttaggtttttaaattttttggtttattttataatttaatttatttttttttatttttcgttaatattttaattgttttggggcggggtggtagggagtgtatgaatgaggataagagaggattgatttttgagagtgaatgaattgttttttttttaattttcgagaagtggtgggatttaatgaattatttataaaaatgaggggttgtgtttagaggttaggtagggtttgtttgagtgcgggagttagtgaattgttttaagagtgggtgggttgaggagttgggatttttttagtttattttgaatattgaaaagtaaatttttgttaaagttggatttttttttttttttattttttttttcgtttttttggatttttggtaaaattgtaattttttttttttttattttttatttttagtaaaatagggagttgttaaagttatattaagtaatttgtagttattatttgtaatatttgaagtgtttttggtaaagttttttaaaaataggaggtgtttgggaatgtgttttgttttgggtgtgtttaaagttttattaagttttaggtaagaattggtattaatgttttattttgggaagttgtattttttttgtttatgttataatttagttgtttttttttttatgagatttttatttttatggtgagaggagtaagggtggttggttagattggttttttttttttttttttttttttttaagacggagttttattttgttattaggttggagtgtagtggcgtaattaatttttaattttttggtttaagagatttttttgttttagttttttaagtagttgggattataggtgtatattattatgttaggttaatttttgtaattttagtagagatggggttttatcgtgttggttaggatggttttttttgattttacgattcgtttatttcggttttttaaagtgttgggattataggtgtgagttagggtattaggtttagatgtggttttttggggagataattttgtttagagatttttttaacgtatttatgttttgtatttgtatagtattaatttggtaattgattattttaatgtaattttgttaaaggagtgatttttatttttttttttaaagaggaggaataagaagatgaggaagaaatcgatgttgtttttgtggaaaagaggtaggtttttggtaaaaggttagagtttggattattttttgttggaggttatagtaaatttttttatagtttattggtttttaagaggtgttacgtttttatatattagtataattacgtagcgtttttttttattcggaaggattattttgttgttaagagggttaagttggatagtgttagagttttgagatagattagtaataatcgaaaatgtattagttttaggttttcggatatcgaggagaatgttaagaggcgaatatataacgttttggagcgttagaggaggaacgagttaaaacggagtttttttgttttgcgtgattagatttcggagttggaaaataatgaaaaggtttttaaggtagttatttttaaaaaagttatagtatatattttgttcgtttaagtagaggagtaaaagtttatttttgaagaggatttgttgcggaaacgacgagaatagttgaaatataaatttgaatagttacggaatttttgtgcgtaaggaaaagtaaggaaaacgattttttttaatagaaatgttttgagtaatcgtttatgaatttgttttaaatgtatgattaaatgtaattttataattttggttgagttttgagattgaaagatttagttataatgtaaattgttttaaattggattttgggtataaaagaatttttttatgtttattattttttttttttttttaatagatttgtatttaagaattgtttttaaaaaattttaagatttatataatgtttttttgtaaatattgttattaaatgtaaataattttaataaaacgtttatagtagttatatagaattttaattttagtatatagtatttagtattataggtattataaattttaattttttttatttaagtatattttgttttttaaagttgatttttttttattgtttttagaaaaaataaaataattggtaaatatattattgagttaaattttaagttgtgaatgttttgtttcgtttttttttttttttaattattattatttttgtttgtttttattaattgtttttttagagggtggttttaagaaaggtaagagtttttttttgttgaaatgggtttgggggttttaaggtttttaagtttttggaggttttaagatgttttttggagattatgataatagttagagttgatagttagaaggaatggtagaaggtaggtgagaaggtgagaggtaggtaaaggagatataagaggttaaaggtagtagttaagtatataaagaggtataaggattggggagttgggaggaaggtgaggaagaaatttttgttattttagttaattagtgttagttttttgtttattttaaatttaggaatt

SEQ ID NO: 118 - DNA, 8056 bp, Artificial Sequence
  chemically treated genomic DNA (Homo sapiens)
aatttttgggtttggagtgagtaggggattggtattggttaattaaagtaataggagttttttttttattttttttttaattttttagtttttatgtttttttgtgtatttaattgttatttttgattttttgtattttttttgtttattttttatttttttatttgttttttgttattttttttaattgttaattttggttgttattatagtttttaggaagtattttagaatttttaagaatttaaagattttaaggtttttagatttattttaatagaggaaaatttttgttttttttaagattattttttgaaggggtaattgatgaaaataaatagggatggtggtggttgggagggggaagaaacgaaataaaatatttataatttaagatttggtttaatgatatatttgttagttattttattttttttaaaaataatagaaaaaaattaattttaaaaagtaaaatgtatttaaataaaaaaaattagggtttatagtatttataatattaggtattatatattaggattgaaattttgtgtaattgttataaacgttttattaaagttatttatatttaatggtaatatttatagagaaatattgtgtaaattttaaaattttttaaaaataatttttaaatataaatttgttaaagaaaaaaaaaagatggtaagtataaaaaagtttttttatgtttaaagtttaatttgaggtagtttatattatggttaaattttttagttttaagatttagttaaggttgtgaggttgtatttgattatgtatttgaaataagtttataggcgattgtttaggatatttttgttagaaggaatcgttttttttatttttttttacgtataagagtttcgtagttgtttaagtttgtgttttaattgttttcgtcgttttcgtaataagttttttttagaaatgagtttttgtttttttgtttggacggataggatgtatgttgtggtttttttaaggataattattttgggggtttttttattgttttttaatttcgggatttggttacgtagggtaaaaaagtttcgttttagttcgttttttttttggcgttttaagacgttgtgtgttcgttttttgatatttttttcggtgttcgaggatttggggttggtgtattttcggttgttgttgatttgttttaggattttgatattgtttaatttgatttttttggtagtaggatagttttttcgagtggagggaggcgttgcgtagttgtgttgatgtgtggagacgtggtattttttgaggattagtgggttgtgaggaggtttgttgtggtttttagtagaaggtgatttagattttgattttttgttaggagtttgttttttttttatagaaataatatcgattttttttttatttttttgttttttttttttaagaaaggaaatagaaattatttttttagtaaggttatattaaaataattaattattagattaatgttgtataaatataaggtatgaatacgttagaaaggtttttggataaaattatttttttaaagagttatatttaagtttggtgttttggtttatatttgtaattttagtattttgggaggtcgaggtgggcggatcgtgaggttaggagagattattttggttaatacgatgaaattttatttttattaaaattataaaaattagtttggtatggtggtgtgtatttgtagttttagttatttgggaggttgaggtaggagaattttttgaattagggggttggaggttgattgcgttattgtattttagtttagtgatagagtgagatttcgttttaaaaaaggaaaaaaaaaaaaaaagaattaatttagttagttatttttattttttttattatgaaggtaagagttttataaagggaaagatagttgggttatggtatggataagaaaagtgtaattttttaggataggatattgatgttaatttttatttaagatttaatgaggttttggatatatttaaagtaaagtatatttttaagtattttttatttttgagggattttattaagaatattttaggtgttgtaaatgatagttgtaaattgtttggtatgattttagtaattttttattttattggaaatgaaaaataaaaaaaaaaaaaattgtagttttgttaaaagtttaagagggcgggggaaggaataaaagaaaaaaaaagtttaattttggtaaggatttgttttttagtgtttaaaataggttgagaagattttagttttttagtttatttatttttgaggtagtttattggttttcgtatttaggtaggttttgtttagtttttaaatatagttttttatttttgtagatagtttattaaattttattatttttcggaagttaagagggaagtaatttatttatttttagagattaatttttttttatttttatttatatattttttgttatttcgttttagggtaattaaaatgttaacgggaggtaagaagaagtggattgagttgtaagataagttagaaggtttaaaaatttaaatgaaatttttgaggggtgggagataaacggggaggggggttgtaaatatgggtagtttaaggggaagggatgggaggaaacgttaaagtttaaggttttagaggtgatgagtttttaaatttttttagatttgttattttttttttttaataagagtggttcgttaaataagttgttaatgaaaatgggaaaggtatttagtcgtttatttttgataggtttgggcgggtttcgtttattagagtcgttgttggtggtgggcggtgtttttttatggagtattaggggttcggggttgttttgcggggaggatttcgtcgaggagagtagagaattcgaggacggagagaaggcgttggagttttgcgaggcgtaggatttgggcgagttgttgtcgttgagagggtaggggaagattatcgaggggtcgatgtattttgaggcggcggcgtttagattttgtaggtataagttggaggtggagtagacgttgtggtcgcgggcggggttcgggttgtcgttgtttttgcgcgtagtttggtaggaggttagtttttttgagacgagtttggcggcggtcgagaagtcgttttatatatagttttggatgatgatgtttttgatgaaggtttcgtcgttcgggtcgtagatgaaattttggtttattatgtttttttttagtagttcggttattatttttagttggtcggtcgtggagaagttttcgttatcgtcgtcgttgttttttcgaagggagaagggtgtgatcgtaacgtaggagggcgagtagagttcggagcggcggttaggggataggggcggggtgggtagtagttcgaattttttttagatattttcgttgggcgtcgggggttgtagttcgttttgttgttgttgttggtagaagttttttttttcgtcgtagtagaaatacggttgtatcgagtcgtagtcgaggttatagtttttgttggtgaagttaacgttgaggggtatcgtcgcgggaggttgttggagcggggtatataaagcgggaggtagttttgagttaaaggggttttggtgcggaaatttggcgtagcgcgtagtgcgcgttatagtttcgaatttttttttttgtagagttattttttaaagcggttgggtggttttggtgggggaataaagggagtatttttttattttttttggatagttttttgttatttcggagacgtatttagtgaattagcgttttggtattcgtcgagttttcgttttttcgggagttcggagcgtaaagttcgggagtcggtttcgtagcggtagaggaatcgaaatcggttttggcgtttttaagaagtcgcgggaggtggcggtgaggaatataatttgttaaaatttaaggtataaagttttgcgttatttgaaggagaaggcgaaaggcgtttgggcgaaagcggttgcgtgaatttcgtttcgcgtcggggttttttcgttgcggttgtttttattcgcgttttaggcgtttttttattttcgtcggtatcgtagttttttttaattttttttttttatcgttttcgtttttatttttagtattgttttcgtttaatattttttttgttagttttttttttttttttcgtcggttggagtggcgagtttagtcgcggattttaatatttttttataaatataaggggggtgttaaataataataggggtattttttttcgtatttaatacggagatgtaattgcgttagagatttcgttgcgatatttttttcggagttattttattaagggtagtagttgttttggaatcgtttagagtttcgtttttcgtagttttttcgtatttcgggcgcgaggatattcgagggcggtcgcggtaggggagttaggattgggtgcggagattcgttttggtttttttaagttaacgattgtaggagaatcggatatattttcgtttttttttttttttgtttgcgtttatttaatattacgttttaatatttttagagatttaggttttaaattgttttattgttttttaaaaagttaaatgttaattttttaaaagaattagggcgggttggaatcgtcgcggggataggcgggcgggacgcgtcgtagtgttcgttttcggttgttagaaatgcggtgagtcgagatttaattgttttttcggagacggggataagttagcgtttgcggagcgatttggtttatataggcgatatgcggttttttttttaaggagtttaagatgtaagggattttttgtttatcgtaaagtaatttttcgttttttaaaatttagagaataattaatataataaagtaggaatgttcgatcggtcgggagtcgacgtgaatatatttataaggtagaaatttcgaaaggataatcgtaaaaattattttcgttttttttttgttttttttttttttattttgataagttattgtatttcgatttaattttggaataatttttatttcgagaaaggtgttaataacgtaggattgggagaaaagatattttatttaggtattcgatttattttagaattaaattgataaaaaagtaaattaaaagataagtggatttcgatgtttatttggttttttatttttcgaaaaaaatttagtatttaagtagttgtaaggagagttttttagagaagcgggttttggtagcggcggggaagtgtttttaaatgggtagaatagttttttcgcgtcgggagagtcgcgtttttggtcgggtgttgttagttttagtgtaaagtgttcgttcgttgttatgggtaaagtttcgtggatgcggtaagggttgcggatcgttgtttgggggattagcgggaggtttgggttagaggcgaagttttttattcgtttcggatttttttttttaggacgttcgtagcgtagttttgttcgttcggtttttttattttagtcggtcgttcgttcgttttttttgttttttattggaattattatagcgagttagataaagtttcgaaaatcggtttttatatttagcgcgattttttttttcgttttttttttcgttaagtttttgagaagttttgtttttttcgaggtaggaggggagttagggacggtcggggttcggcggtggcggtcgcgagtagtatagttcgggggtttttagtcgtttagattttcgtattataaagggtcggtgggcggagattagcgagagaggattttttttttttttttttacgttttttgttttgggaattcgggaggggcgtttatggggagggtggggagggtggggaaggtggggaggagatttagtcgggtagtcgagtattttagttttaggatgtaaatagagtaagagagtcgtatgaattaattacgcgcgtttattatttttttttgtttttttttaaattttttttttttttttgttgttttttcgtagtagtattgtttgataaatcgtatttttgttttgtgagtataaattatcgtaggcggaatagttgttttttatatcgagaacgtattgcgcgtttatcgttacgttacgcgcgtattaggttgtagggcgtttcgttaaggttggggaaagggtcgcgttttgattaagagttttagggagagtggaggaaagaagggtattaatgggcgcgcgtttagagcgtgggatgttagtgtagatagggaggaatgatagaggtataaggaggaaaacgatgtttagaatgattaaaataatttagtaacgtattgttacgtatatttggagagcgcgttatgaataaatttttattgtatttgttggggggagttatgtattatgtattatgtatgtatagttatttggattggatattttttatttagattgagttttttaatttgttgttaaagtagtagatatcgttttttttgtttcgtttgtttaggttttcgtggggtttcgtgcgggaggcgtttgtttagttttgagatgtgtttgtttgttttagagttggattagggcgagagggaggttgtttgttttttgttagtttgtattttatcgttttatttttacgttttttatacggagtttttaattttttagttaggttttagaagagataaattttttttgcgttttgtggcgtcggtttgtaatagtttcgggttgtcgggtttgggagaaattaaaggtgttagacgggagaatatgggaggggtagggggtattcgaatcgcgggatcggattttttaaaaggggtaagtggagagtttgtggatcgagtcgggggagttagtagagatttttgtgaaaaaaatcgttaattttttttttttcggataaatcggacgtttaatttttttttaggttttttttttttttttattattggaaatgcggttatgtataaaaaatgtatcgattttgattaaagaagaggagaggagtattattttcgtgtttttttttgggggggggggagttttgagttaattaaaatttggttgttttttaggtattaattttttagtttattgatttataattttttttgaatattagtgaaagtgtattgtatgtaattcgtaaacgtgtatttatattttatttacgtttcgatttagttagttgtttagttttatatatgatttgtttgttttttgaaatgatttatatttaatatataatgtatattttttcgggattttttattttgtgttattttacggtatgaaaaataaaaaatattttttttatttttggttttttatttaaaggtattttaagtaaatttttttttttttttattatttttaaaagagaaaataattcgggggaaaggggtgcgtgtatagtatgtacgttgtttaagatgggttattattcgttgagtttgtagtttagcgtttaagtgttaagtgaatatagtagtttttaaattcgatgtattgtataatttagttttaaggattgtaaattatttttgtttttaggtttttgtcgtaaacgcggggagtaattaatcgttatgttggattttgttgtaaagcgttttttttttcgttttttttttgggtagtattcgcgtttaggtttgcgaaagtaaagtaagtgtgttttttattggtagtagagattatcgcgtttggatgttaacgagggcgggggttaggtgggggtaggagtaggagcgttcgaggtgtaaggtttttagcgggggaaggataggcggttttttaaaataagtttttagttatttttttgttatttttttaggttggttgtagaaggttcgaagaaagaggagttattggaggaaaaagtggtttagaggtgattatttaatcgtataagagatggtgaaaattaatttattattattgttaatgaatattattttatggagaatcggtaatggtaaacgtgaaataatttataagtatatagacgaaaaaaaaattttaataaattttaaaacggttaaataagtt

SEQ ID NO: 119 - DNA, 409 bp, Artificial Sequence
  chemically treated genomic DNA (Homo sapiens)
tttagagtgatatttttattttatgtttggttatttattttttttttgggaagagagtcgaggtggggtaagggatgtgtatttttttaaggagtgggagaattattttagcgaatgtttgtgttgttttagttttgtttataaagtttcgttatgtttatagatggttgcgtaatttattattttatttaatttttatgtattttttttgagggagtaagagttgttatagttaagtttaggttagtaaatatttattaagttgtaggtattgtagggtatagagatgaattcgatttagtttttgttttggaggtttgggaatttgtttaagattatttagtgagtagttgagttagggtttttaattaaagattttgggtttaggttttggtttgatgttaggttt

SEQ ID NO: 120 - DNA, 409 bp, Artificial Sequence
  chemically treated genomic DNA (Homo sapiens)
aggtttgatattagattagggtttgggtttagggtttttagttgagaattttagtttagttgtttattgagtgattttgagtaagtttttagatttttagggtagaagttaaatcggatttatttttatgttttgtagtatttgtaatttggtgaatatttattgatttaaatttggttgtaatagtttttatttttttagaggaggtatatgagagttaaatgaggtaatgaattgcgtagttatttgtaaatatgacgaggttttgtaaatagaattgggataatataaatattcgttagaataatttttttattttttgaaagagtatatattttttattttatttcggttttttttttagggggaggatgggtggttaaatataagatggagatgttattttaga

SEQ ID NO: 121 - DNA, 19 bp, Artificial Sequence
  TGFA detection primer
ggtttgtttgggaggtaag

SEQ ID NO: 122 - DNA, 18 bp, Artificial Sequence
  TGFA detection primer
ccccctaaaaacacaaaa

SEQ ID NO: 123 - DNA, 18 bp, Artificial Sequence
  TGFA detection oligonucleotide
aagttaggcgttttttgt

SEQ ID NO: 124 - DNA, 18 bp, Artificial Sequence
  TGFA detection oligonucleotide
aagttaggtgttttttgt

SEQ ID NO: 125 - DNA, 20 bp, Artificial Sequence
  CSNK2B detection primer
ggggaaatggagaagtgtaa

SEQ ID NO: 126 - DNA, 20 bp, Artificial Sequence
  CSNK2B detection primer
ctaccaatcccaaaataacc

SEQ ID NO: 127 - DNA, 18 bp, Artificial Sequence
  CSNK2B detection oligonucleotide
taggttagcgtattggga

SEQ ID NO: 128 - DNA, 18 bp, Artificial Sequence
  CSNK2B detection oligonucleotide
taggttagtgtattggga

SEQ ID NO: 129 - DNA, 20 bp, Artificial Sequence
  NF1 detection primer
ttgggagaaaggttagtttt

SEQ ID NO: 130 - DNA, 20 bp, Artificial Sequence
  NF1 detection primer
atacaaactcccaatattcc

SEQ ID NO: 131 - DNA, 18 bp, Artificial Sequence
  NF1 detection oligonucleotide
aattaaaacgccctaaaa

SEQ ID NO: 132 - DNA, 18 bp, Artificial Sequence
  NF1 detection oligonucleotide
aattaaaacaccctaaaa

SEQ ID NO: 133 - DNA, 20 bp, Artificial Sequence
  MLH1 detection primer
tttaaggtaagagaataggt

SEQ ID NO: 134 - DNA, 20 bp, Artificial Sequence
  MLH1 detection primer
ttaaccctactcttataacc

SEQ ID NO: 135 - DNA, 18 bp, Artificial Sequence
  MLH1 detection oligonucleotide
ttgtaggacgtttatatg

SEQ ID NO: 136 - DNA, 18 bp, Artificial Sequence
  MLH1 detection oligonucleotide
ttgtaggatgtttatatg

1. A nucleic acid comprising a sequence at least 18 bases in length of a segment of the chemically pretreated genomic DNA according to one of the sequences taken from the group of Seq. ID No.1 to Seq. ID No.120 and sequences complementary thereto.

2. An oligomer, in particular an oligonucleotide or peptide nucleic acid (PNA)-oligomer, said oligomer comprising in each case at least one base sequence having a length of at least 9 nucleotides which hybridizes to or is identical to a chemically pretreated genomic DNA according to one of the Seq ID Nos 1 to 120 according to claim 1.

3. The oligomer as recited in claim 2; wherein the base sequence includes at least one CpG dinucleotide.

4. The oligomer as recited in claim 2; characterized in that the cytosine of the CpG dinucleotide is located approximately in the middle third of the oligomer.

5. A set of oligomers, comprising at least two oligomers according to any of claims 2 to 4.

6. A set of oligomers as recited in claim 5, comprising oligomers for detecting the methylation state of all CpG dinucleotides within one of the sequences according to Seq. ID Nos. 1 through 120 according to claim 1, and sequences complementary thereto.

7. A set of at least two oligonucleotides as recited in claim 2, which can be used as primer oligonucleotides for the amplification of DNA sequences of one of Seq. ID 1 through Seq. ID 120 and sequences complementary thereto and/or sequences of a chemically pretreated DNA of genes according to claim 2, and sequences complementary thereto and segments thereof.

8. A set of oligonucleotides as recited in claim 7, characterized in that at least one oligonucleotide is bound to a solid phase.

9. Use of a set of oligomer probes comprising at least ten of the oligomers according to any of claims 5 through 8 for detecting the cytosine methylation state and/or single nucleotide polymorphisms (SNPs) in a chemically pretreated genomic DNA according to claim 1.

10. A method for manufacturing an arrangement of different oligomers (array) fixed to a carrier material for analyzing diseases associated with the methylation state of the CpG dinucleotides of one of the Seq. ID 1 through Seq. ID 120 and sequences complementary thereto, wherein at least one oligomer according to any of the claims 2 through 4 is coupled to a solid phase.

11. An arrangement of different oligomers (array) obtainable according to claim 10.

12. An array of different oligonucleotide- and/or PNA-oligomer sequences as recited in claim 11, characterized in that these are arranged on a plane solid phase in the form of a rectangular or hexagonal lattice.

13. The array as recited in any of the claims 11 or 12, characterized in that the solid phase surface is composed of silicon, glass, polystyrene, aluminium, steel, iron, copper, nickel, silver, or gold.

14. A DNA- and/or PNA-array for analyzing diseases associated with the methylation state of genes, comprising at least one nucleic acid according to one of the preceeding claims.

15. A method for determining genetic and/or epigenetic parameters for the characterisation, classification, differentiation, grading, staging, treatment and/or diagnosis of astrocytomas, or the predisposition to astrocytomas by analyzing cytosine methylations, characterized in that the following steps are carried out:
obtaining a biological sample containing genomic DNA
extracting the genomic DNA
in the genomic DNA sample, cytosine bases which are unmethylated at the 5-position are converted, by chemical treatment, to uracil or another base which is dissimilar to cytosine in terms of hybridization behavior;
fragments of the chemically pretreated genomic DNA are amplified using sets of primer oligonucleotides according to claim 8 or 9 and a polymerase, the amplificates carrying a detectable label;

16. A method for determining genetic and/or epigenetic parameters for the characterisation, classification, differentiation, grading, staging, treatment and/or diagnosis of astrocytomas, or the predisposition to astrocytomas by analyzing cytosine methylations, characterized in that the following steps are carried out:
obtaining a biological sample containing genomic DNA
extracting the genomic DNA
in the genomic DNA sample, cytosine bases which are unmethylated at the 5-position are converted, by chemical treatment, to uracil or another base which is dissimilar to cytosine in terms of hybridization behavior;
fragments of the chemically pretreated genomic DNA are amplified using sets of primer oligonucleotides according to claim 8 or 9 and a polymerase, the amplificates carrying a detectable label;
Identification of the methylation status of one or more cytosine positions
analysis of the methylation status of the cytosine positions by reference to one or more data sets.

17. The method as recited in claims 15 or 16, characterized in that the amplification step preferentially amplifies DNA which is of particularly interest in astrocytoma or brain tissue, based on the specific genomic methylation status of brain tissues, as opposed to background DNA.

18. The method as recited in one of claim 15 through 17, characterized in that the chemical treatment is carried out by means of a solution of a bisulfite, hydrogen sulfite or disulfite.

19. The method as recited in one of the claims 15 through 18, characterized in that more than ten different fragments having a length of 100-2000 base pairs are amplified.

20. The method as recited in one of the claims 15 through 19, characterized in that the amplification of several DNA segments is carried out in one reaction vessel.

21. The method as recited in one of the claims 15 through 20, characterized in that the polymerase is a heat-resistant DNA polymerase.

22. The method as recited in claim 21, characterized in that the amplification is carried out by means of the polymerase chain reaction (PCR).

23. The method as recited in one of the claims 15 through 22, characterized in that the labels of the amplificates are fluorescence labels.

24. The method as recited in one of the claims 15 through 22, characterized in that the labels of the amplificates are radionuclides.

25. The method as recited in one of the claims 15 through 22, characterized in that the labels of the amplificates are detachable molecule fragments having a typical mass which are detected in a mass spectrometer.

26. The method as recited in one of the claims 15 through 22, characterized in that the amplificates or fragments of the amplificates are detected in the mass spectrometer.

27. The method as recited in one of the claims 25 and/or 26, characterized in that the produced fragments have a single positive or negative net charge for better detectability in the mass spectrometer.

28. The method as recited in one of the claims 25 through 27, characterized in that detection is carried out and visualized by means of matrix assisted laser desorption/ionization mass spectrometry (MALDI) or using electron spray mass spectrometry (ESI).

29. The method as recited in one of the claims 15 through 28, characterized in that the genomic DNA is obtained from cells or cellular components which contain DNA, sources of DNA comprising, for example, cell lines, histological slides, biopsies, cerebrospinal fluid, lymphatic fluid, tissue embedded in paraffin; for example, brain or lymphatic tissue and all possible combinations thereof.

30. A kit comprising a bisulfite (=disulfite, hydrogen sulfite) reagent as well as oligonucleotides and/or PNA-oligomers according to one of the claims 2 through 4.

31. The use of a nucleic acid according to claims 1, of an oligonucleotide or PNA-oligomer according to one of the claims 2 through 4, of a kit according to claim 30, of an array according to one of the claims 11 through 14, of a set of oligonucleotides according to one of claims 5 through 8 for the characterisation, classification, differentiation, grading, staging, treatment and/or diagnosis of astrocytomas, or the predisposition to astrocytomas.

32. The use of a nucleic acid according to claims 1, of an oligonucleotide or PNA-oligomer according to one of the claims 2 through 4, of a kit according to claim 30, of an array according to one of the claims 11 through 14, of a set of oligonucleotides according to one of claims 5 through 8 for the therapy of astrocytomas.
